(19) United States
(12) Patent Application Publication
(10) Pub. No.: US 2022/0325363 A1
(43) Pub. Date: Oct. 13, 2022

(54) ASSAYS AND METHODS FOR DETECTION OF NUCLEIC ACIDS

(71) Applicant: Mammoth Biosciences, Inc., Brisbane, CA (US)

(72) Inventors: James Paul BROUGHTON, San Francisco, CA (US); Jasmeet Singh, Santa Clara, CA (US); Clare Louise FASCHING, Redwood City, CA (US); Maria-Nefeli TSALOGLOU, San Francisco, CA (US); Pedro Patrick Draper GALARZA, Oakland, CA (US); Janice Sha CHEN, San Francisco, CA (US); Xin MIAO, Mountain View, CA (US); Lucas HARRINGTON, San Francisco, CA (US); Daniel Thomas DRZAL, Redwood City, CA (US); Sarah Jane Shapiro, Pacifica, CA (US)

(21) Appl. No.: 17/555,236

(22) Filed: Dec. 17, 2021

Related U.S. Application Data
(63) Continuation of application No. PCT/US2020/038242, filed on Jun. 17, 2020.
(60) Provisional application No. 62/985,850, filed on Mar. 5, 2020.
(60) Provisional application No. 62/944,926, filed on Dec. 6, 2019.
(60) Provisional application No. 62/881,809, filed on Aug. 1, 2019.
(60) Provisional application No. 62/879,325, filed on Jul. 26, 2019.
(60) Provisional application No. 62/863,178, filed on Jun. 18, 2019.

(51) Int. Cl. C12Q 1/70; B01L 3/00

(52) U.S. Cl. CPC C12Q 1/701; B01L 3/5023; B01L 2300/069; B01L 2200/16; B01L 2300/0883; B01L 2400/0622; B01L 2400/086; B01L 2300/1805; C12Q 1/6823

(57) ABSTRACT

Described herein are devices, systems, fluidic devices, kits, and methods for detection of target nucleic acids.

### CROSS-REFERENCE

[0001] This application is a continuation of International Application No. PCT/US2020/038242, filed Jun. 17, 2020, which claims priority to and benefit from U.S. Provisional Application No.: 62/863,178, filed on June 18, 2019, U.S. Provisional Application No.: 62/879,325, filed on Jul. 26, 2019, U.S. Provisional Application No.: 62/881,809, filed on Aug. 1, 2019, U.S. Provisional Application No.: 62/944,926, filed on Dec. 6, 2019, and U.S. Provisional Application No.: 62/985,850, filed on Mar. 5, 2020, the entire contents of each of which are herein incorporated by reference.

### SEQUENCE LISTING

[0002] The instant application contains a Sequence Listing which has been submitted electronically in ASCII format and is hereby incorporated by reference in its entirety. Said ASCII copy, created on Jul. 22, 2020, is named 53694-730_601_SL.txt and is 1,121,102 bytes in size.

### BACKGROUND

[0003] Various communicable diseases can easily spread from an individual or environment to an individual. These diseases may include but are not limited to influenza. Individuals with influenza may have poor outcomes. The detection of the ailments, especially at the early stages of infection, may provide guidance on treatment or intervention to reduce the progression or transmission of the ailment.

### SUMMARY

[0004] In various aspects, the present disclosure provides a microfluidic cartridge for detecting a target nucleic acid comprising: an amplification chamber fluidically connected to a valve; a detection chamber fluidically connected to the valve, wherein the valve is connected to a sample metering channel; a detection reagent chamber fluidically connected to the detection chamber via a resistance channel, the detection reagent chamber comprising a programmable nuclease, a guide nucleic acid, and a labeled detector nucleic acid, wherein the labeled detector nucleic acid is capable of being cleaved upon binding of the guide nucleic acid to a segment of a target nucleic acid.

[0005] In some aspects, the sample metering channel controls volumes of liquids dispensed in a channel or chamber. In some aspects, the sample metering channel is fluidically connected to the detection chamber. In some aspects, the resistance channel has a serpentine path, an angular path, or a circuitous path. In some aspects, the valve is a rotary valve, pneumatic valve, a hydraulic valve, an elastomeric valve. In some aspects, the resistance channel is fluidically connected with the valve. In some aspects, the valve comprises casing comprising a “substrate” or an “over-mold.” In some aspects, the valve is actuated by a solenoid. In some aspects, the valve is controlled manually, magnetically, electrically, thermally, by a bistable circuit, with a piezoelectric material, electrochemically, with phase change, rheologically, pneumatically, with a check valve, with capillarity, or any combination thereof. In some aspects, the rotary valve fluidically connects at least 3, at least, 4, or at least 5 chambers.

[0006] In some aspects, the microfluidic cartridge further comprises an amplification reagent chamber fluidically connected to the amplification chamber. In some aspects, the microfluidic cartridge further comprises a sample chamber fluidically connected to the amplification reagent chamber. In some aspects, the microfluidic cartridge further comprises a sample inlet connected to the sample chamber. In some aspects, the sample inlet is sealable. In some aspects, the sample inlet forms a seal around the sample.

[0007] In some aspects, the sample chamber comprises a lysis buffer. In some aspects, the microfluidic cartridge further comprises a lysis buffer storage chamber fluidically connected to the sample chamber. In some aspects, the lysis buffer storage chamber comprises a lysis buffer. In some aspects, the lysis buffer is a dual lysis/amplification buffer.

[0008] In some aspects, the lysis buffer storage chamber is fluidically connected to the sample chamber through a second valve. In some aspects, the sample chamber is fluidically connected to the amplification chamber through the amplification reagent chamber. In some aspects, the sample chamber is fluidically connected to the amplification reagent chamber through the amplification chamber. In some aspects, the microfluidic cartridge is configured to direct fluid bidirectionally between the amplification reagent chamber and amplification chamber. In some aspects, the detection reagent chamber is fluidically connected to the amplification chamber. In some aspects, the amplification chamber is fluidically connected to the detection chamber through the detection reagent chamber. In some aspects, comprising a reagent port above the detection chamber configured to deliver fluid from the detection reagent chamber to the detection chamber. In some aspects, the amplification chamber is fluidically connected to the detection reagent chamber through the detection chamber.

[0009] In some aspects, the resistance channel is configured to reduce backflow into the detection chamber and the detection reagent chamber. In some aspects, the sample metering channel is configured to direct a predetermined volume of fluid from the detection reagent chamber to the detection chamber. In some aspects, the amplification chamber and detection chamber are thermally isolated. In some aspects, the detection reagent chamber is fluidically connected to the detection chamber. In some aspects, the detection reagent chamber is fluidically connected to the detection chamber via a second resistance channel. In some aspects, the resistance channel or the second resistance channel is a serpentine resistance channel. In some aspects, the resistance channel or the second resistance channel comprises at least two hairpins. In some aspects, the resistance channel or the second resistance channel comprises at least one, at least 2, at least 3, or at least 4 right angles.

[0010] In some aspects, the amplification chamber comprises a sealable sample inlet. In some aspects, the sample inlet is configured to form a seal around a swab. In some aspects, microfluidic cartridge is configured to connect to a first pump to pump fluid from the amplification chamber to the detection chamber. In some aspects, microfluidic cartridge is configured to connect to a second pump to pump fluid from the detection reagent chamber to the detection chamber. In some aspects, first pump or the second pump is a pneumatic pump, a peristaltic pump, a hydraulic pump, or a syringe pump. In some aspects, the amplification chamber is fluidically connected to a port configured to receive pneumatic pressure. In some aspects, the amplification chamber is fluidically connected to the port through a channel. In some aspects, the amplification reagent chamber is connected to a second port configured to receive pneumatic pressure. In some aspects, the amplification reagent chamber is fluidically connected to the second port through a second channel.

[0011] In some aspects, the microfluidic cartridge is configured to connect to a third pump to pump fluid from the amplification reagent chamber to the amplification chamber. In some aspects, the third pump is a pneumatic pump, a peristaltic pump, a hydraulic pump, or a syringe pump. In some aspects, the detection reagent chamber is connected to a port configured to receive pneumatic pressure. In some aspects, the detection reagent chamber is fluidically connected to a third port through a third channel.

[0012] In some aspects, the microfluidic cartridge is configured to connect to a fourth pump to pump fluid from the detection reagent chamber to the detection chamber. In some aspects, the fourth pump is a pneumatic pump, a peristaltic pump, a hydraulic pump, or a syringe pump.

[0013] In some aspects, the microfluidic cartridge further comprises a plurality of ports configured to couple to a gas manifold, wherein the plurality of ports is configured to receive pneumatic pressure. In some aspects, any chamber of the microfluidic cartridge is connected to the plurality of ports. In some aspects, the valve is opened upon application of current electrical signal.

[0014] In some aspects, the detection reagent chamber is circular. In some aspects, the detection reagent chamber is elongated. In some aspects, the detection reagent chamber is hexagonal. In some aspects, a region of the resistance channel is molded to direct flow in a direction perpendicular to the net flow direction. In some aspects, a region of the resistance channel is molded to direct flow in a direction perpendicular to the axis defined by two ends of the resistance channel. In some aspects, a region of the resistance channel is molded to direct flow along the z-axis of the microfluidic cartridge. In some aspects, the valve is fluidically connected to two detection chambers via an amplification mix splitter. In some aspects, the valve is fluidically connected to 3, 4, 5, 6, 7, 8, 9, or 10 detection chambers via an amplification mix splitter.

[0015] In some aspects, the microfluidic cartridge further comprises a second valve fluidically connected to the detection reagent chamber and the detection chamber. In some aspects, the detection chamber is vented with a hydrophobic PTFE vent. In some aspects, the detection chamber comprises an optically transparent surface.

[0016] In some aspects, the amplification chamber is configured to hold from 10 μL to 500 μL of fluid. In some aspects, the amplification reagent chamber is configured to hold from 10 μL to 500 μL of fluid. In some aspects, the microfluidic cartridge is configured to accept from 2 μL to 100 μL of a sample comprising a nucleic acid. In some aspects, the amplification reagent chamber comprises between 5 and 200 μl an amplification buffer. In some aspects, the amplification chamber comprises 45 μ1 amplification buffer. In some aspects, the detection reagent chamber stores from 5 to 200 μl of fluid containing the programmable nuclease, the guide nucleic acid, and the labeled detector nucleic acid.

[0017] In some aspects, the microfluidic cartridge comprises 2, 3, 4, 5, 6, 7, or 8 detection chambers. In some aspects, the 2, 3, 4, 5, 6, 7, or 8 detection chambers are fluidically connected to a single sample chamber. In some aspects, the detection chamber holds up to 100 μL, 200 μL, 300 μL, or 400 μL of fluid.

[0018] In some aspects, the microfluidic cartridge comprises 5-7 layers. In some aspects, the microfluidic cartridge comprises layers as shown in FIG. 130B. In some aspects, the microfluidic cartridge further comprises a sample inlet configured to adapt with a slip luer tip. In some aspects, the slip luer tip is adapted to fit a syringe holding a sample. In some aspects, the sample inlet is capable of being hermetically sealed.

[0019] In some aspects, the microfluidic cartridge further comprises a sliding valve. In some aspects, the sliding valve connects the amplification reagent chamber to the amplification chamber. In some aspects, the sliding valve connects the amplification chamber to the detection reagent chamber. In some aspects, the sliding valve connects the amplification reagent chamber to the detection chamber.

[0020] In various aspects, the present disclosure provides a manifold configured to accept the microfluidic cartridge. In some aspects, the manifold comprises a pump configured to pump fluid into the detection chamber, an illumination source configured to illuminate the detection chamber, a detector configured to detect a detectable signal produced by the labeled detector nucleic acid, and a heater configured to heat the amplification chamber. In some aspects, the manifold further comprises a second heater configured to heat the detection chamber.

[0021] In some aspects, the illumination source is a broad spectrum light source. In some aspects, the illumination source light produces an illumination with a bandwidth of less than 5 nm. In some aspects, the illumination source is a light emitting diode. In some aspects, the light emitting diode produces white light, blue light, or green light.

[0022] In some aspects, the detectable signal is light. In some aspects, the detector is a camera or a photodiode. In some aspects, the detector has a detection bandwidth of less than 100 nm, less than 75 nm, less than 50 nm, less than 40 nm, less than 30 nm, less than 20 nm, less than 10 nm, or less than 5 nm.

[0023] In some aspects, the manifold further comprises an optical filter configured to be between the detection chamber and the detector. In some aspects, the amplification chamber comprises amplification reagents. In some aspects, the amplification reagent chamber comprises amplification reagents. In some aspects, the amplification reagents comprise a primer, a polymerase, dNTPs, an amplification buffer. In some aspects, the amplification chamber comprises a lysis buffer. In some aspects, the amplification reagent chamber comprises a lysis buffer. In some aspects, the amplification reagents comprise a reverse transcriptase. In some aspects, the amplification reagents comprise reagents for thermal cycling amplification. In some aspects, the amplification reagents comprise reagents for isothermal amplification. In some aspects, the amplification reagents comprise reagents for transcription mediated amplification (TMA), helicase dependent amplification (HDA), circular helicase dependent amplification (cHDA), strand displacement amplification (SDA), loop mediated amplification (LAMP), exponential amplification reaction (EXPAR), rolling circle amplification (RCA), ligase chain reaction (LCR), simple method amplifying RNA targets (SMART), single primer isothermal amplification (SPIA), multiple displacement amplification (MDA), nucleic acid sequence based amplification (NASBA), hinge-initiated primer-dependent amplification of nucleic acids (HIP), nicking enzyme amplification reaction (NEAR), or improved multiple displacement amplification (IMDA). In some aspects, the amplification reagents comprise reagents for loop mediated amplification (LAMP).

[0024] In some aspects, the lysis buffer and the amplification buffer are a single buffer. In some aspects, the lysis buffer storage chamber comprises a lysis buffer. In some aspects, the lysis buffer has a pH of from pH 4 to pH 5.

[0025] In some aspects, the microfluidic cartridge further comprises reverse transcription reagents. In some aspects, the reverse transcription reagents comprise a reverse transcriptase, a primer, and dNTPs. In some aspects, the programmable nuclease comprises an RuvC catalytic domain. In some aspects, the programmable nuclease is a type V CRISPR/Cas effector protein. In some aspects, the type V CRISPR/Cas effector protein is a Cas12 protein. In some aspects, the Cas12 protein comprises a Cas12a polypeptide, a Cas12b polypeptide, a Cas12c polypeptide, a Cas12d polypeptide, a Cas12e polypeptide, a C2c4 polypeptide, a C2c8 polypeptide, a C2c5 polypeptide, a C2c10 polypeptide, and a C2c9 polypeptide. In some aspects, the Cas12 protein has at least 80%, at least 85%, at least 90%, at least 92%, at least 95%, at least 97%, or at least 99% sequence identity to any one of SEQ ID NO: 27-SEQ ID NO: 37. In some aspects, the Cas12 protein is selected from SEQ ID NO: 27-SEQ ID NO: 37.

[0026] In some aspects, the type V CRIPSR/Cas effector protein is a Cas14 protein. In some aspects, the Cas14 protein comprises a Cas14a polypeptide, a Cas14b polypeptide, a Cas14c polypeptide, a Cas14d polypeptide, a Cas14e polypeptide, a Cas 14f polypeptide, a Cas14g polypeptide, a Cas14h polypeptide, a Cas14i polypeptide, a Cas14j polypeptide, or a Cas14k polypeptide. In some aspects, the Cas14 protein has at least 80%, at least 85%, at least 90%, at least 92%, at least 95%, at least 97%, or at least 99% sequence identity to any one of SEQ ID NO: 38-SEQ ID NO: 129. In some aspects, the Cas14 protein is selected from SEQ ID NO: 38-SEQ ID NO: 129.

[0027] In some aspects, the type V CRIPSR/Cas effector protein is a CasΦ protein. In some aspects, the CasΦ protein has at least 80%, at least 85%, at least 90%, at least 92%, at least 95%, at least 97%, or at least 99% sequence identity to any one of SEQ ID NO: 274-SEQ ID NO: 321. In some aspects, the Case protein is selected from SEQ ID NO: 274-SEQ ID NO: 321.

[0028] In some aspects, microfluidic cartridge further provides one or more chambers for in vitro transcribing amplified coronavirus target nucleic acid. In some aspects, the in vitro transcribing comprises contacting the amplified coronavirus target nucleic acid to reagents for in vitro transcription. In some aspects, the reagents for in vitro transcription comprise an RNA polymerase, NTPs, and a primer.

[0029] In some aspects, the programable nuclease comprises a HEPN cleaving domain. In some aspects, the programmable nuclease is a type VI CRISPR/Cas effector protein. In some aspects, the type VI CRISPR/Cas effector protein is a Cas13 protein. In some aspects, the Cas13 protein comprises a Cas13a polypeptide, a Cas13b polypeptide, a Cas13c polypeptide, a Cas13c polypeptide, a Cas13d polypeptide, or a Cas13e polypeptide. In some aspects, the Cas13 protein has at least 80%, at least 85%, at least 90%, at least 92%, at least 95%, at least 97%, or at least 99% sequence identity to any one of SEQ ID NOs: 130-SEQ ID NO: 137. In some aspects, the Cas13 protein is selected from SEQ ID NOs: 130-SEQ ID NO: 137.

[0030] In some aspects, the target nucleic acid is from a virus. In some aspects, the virus comprises a respiratory virus. In some aspects, the respiratory virus is an upper respiratory virus. In some aspects, the virus comprises an influenza virus. In some aspects, the virus comprises a coronavirus.

[0031] In some aspects, the coronavirus target nucleic acid is from SARS-CoV-2. In some aspects, the coronavirus target nucleic acid is from an N gene, an E gene, or a combination thereof. In some aspects, the coronavirus target nucleic acid has a sequence of any one of SEQ ID NO: 333-SEQ ID NO: 338. In some aspects, the influenza virus comprises an influenza A virus, influenza B virus, or a combination thereof. In some aspects, the plurality of target sequences comprises sequences from influenza A virus, influenza B virus, and a third pathogen.

[0032] In some aspects, the guide nucleic acid is a guide RNA. In some aspects, the guide nucleic acid has at least 80%, at least 85%, at least 90%, at least 92%, at least 95%, at least 97%, or at least 99% sequence identify to any one of SEQ ID NO: 323-SEQ ID NO: 328. In some aspects, the guide nucleic acid is selected from any one of SEQ ID NO: 323-SEQ ID NO: 328. In some aspects, the microfluidic cartridge comprises a control nucleic acid. In some aspects, the control nucleic acid is in the detection chamber. In some aspects, the control nucleic acid is RNaseP. In some aspects, the control nucleic acid has a sequence of SEQ ID NO: 379.

[0033] In some aspects, the guide nucleic acid has at least 80%, at least 85%, at least 90%, at least 92%, at least 95%, at least 97%, or at least 99% sequence identify to any one of SEQ ID NO: 330-SEQ ID NO: 332. In some aspects, the guide nucleic acid is selected from any one of SEQ ID NO: 330-SEQ ID NO: 332. In some aspects, the guide nucleic acid targets a plurality of target sequences.

[0034] In some aspects, the microfluidic cartridge comprises a plurality of guide sequences tiled against a virus. In some aspects, the labeled detector nucleic acid comprises a single stranded reporter comprising a detection moiety. In some aspects, the detection moiety is a fluorophore, a FRET pair, a fluorophore/quencher pair, or an electrochemical reporter molecule. In some aspects, the electrochemical reporter molecule comprises a species shown in FIG. 149. In some aspects, the labeled detector produced a detectable signal upon cleavage of the detector nucleic acid. In some aspects, the detectable signal is a colorimetric signal, a fluorescence signal, an amperometric signal, or a potentiometric signal.

[0035] In various aspects, the present disclosure provides a method of detecting a target nucleic acid, the method comprising: providing a sample from a subject; adding the sample to a microfluidic cartridge; correlating a detectable signal to the presence or absence of a target nucleic acid; and optionally quantifying the detectable signal, thereby quantifying an amount of the target nucleic acid present in the sample.

[0036] In some aspects, a microfluidic cartridge may be used in a method for detecting a target nucleic acid. In some aspects, a system may be used in a method for detecting a targeting nucleic acid. In some aspects, a programmable nuclease may be used in a method for detecting a target nucleic acid. In some aspects, a composition may be used in a method for detecting a target a nucleic acid. In some aspects, a DNA-activated programmable RNA nuclease may be used in a method for assaying for a target deoxyribonucleic acid from a virus in a sample. In some aspects, a DNA-activated programmable RNA nuclease may be used in a method of assaying for a target ribonucleic acid from a virus in a sample. In some aspects, a programmable nuclease may be used in a method for detecting a target nucleic acid in a sample.

[0037] In various aspects, the present disclosure provides a system for detecting a target nucleic acid, said system comprising: a guide nucleic acid targeting a target sequence from a virus; a programmable nuclease capable of being activated when complexed with the guide nucleic acid and the target sequence; and a reporter, wherein the reporter is capable of being cleaved by the activated nuclease, thereby generating a detectable signal.

[0038] In some aspects, the reporter comprises a single stranded reporter comprising a detection moiety. In some aspects, the virus comprises an influenza virus. In some aspects, the influenza virus comprises an influenza A virus, influenza B virus, or a combination thereof. In some aspects, the virus comprises a respiratory virus. In some aspects, the respiratory virus is an upper respiratory virus. In some aspects, the guide nucleic acid targets a plurality of target sequences.

[0039] In some aspects, the system comprises a plurality of guide sequences tiled against the virus. In some aspects, the plurality of target sequences comprises sequences from influenza A virus, influenza B virus, and a third pathogen. In some aspects, the single stranded reporter comprises the detection moiety at the 5′ end. In some aspects, the single stranded reporter comprises a biotin-dT/FAM moiety or a biotin-dT/ROX moiety. In some aspects, the single stranded reporter comprises a chemical functional handle at the 3′end capable of being conjugated to a substrate.

[0040] In some aspects, the substrate is a magnetic bead. In some aspects, the substrate is a surface of a reaction chamber. In some aspects, downstream of the reaction chamber is a test line. In some aspects, the test line comprises a streptavidin. In some aspects, downstream of the test line is a flow control line. In some aspects, the flow control line comprises an anti-IgG antibody. In some aspects, the anti-IgG antibody comprises an anti-rabbit IgG antibody.

[0041] In some aspects, the activated nuclease is capable of cleaving the single stranded reporter and releases the biotin-dT/FAM moiety or the biotin-dT/ROX moiety. In some aspects, the biotin-dT/FAM moiety is capable of binding the streptavidin at the test line. In some aspects, the reporter is an electroactive reporter. In some aspects, the electroactive reporter comprises biotin and methylene blue. In some aspects, the reporter is an enzyme-nucleic acid. In some aspects, the enzyme-nucleic acid is an invertase enzyme. In some aspects, an enzyme of the enzyme-nucleic acid is a sterically hindered enzyme.

[0042] In some aspects, upon cleavage of a nucleic acid of the enzyme-nucleic acid, the enzyme is functional. In some aspects, the detectable signal is a colorimetric signal, a fluorescence signal, an amperometric signal, or a potentiometric signal.

[0043] In various aspects, the present disclosure provides a method of detecting a target nucleic acid in a sample comprising: contacting the sample with a guide nucleic acid targeting a target sequence; a programmable nuclease capable of being activated when complexed with the guide nucleic acid and the target sequence; and a reporter, wherein the reporter is capable of being cleaved by the activated nuclease, thereby generating a detectable signal.

[0044] In some aspects, the target nucleic acid is from an exogenous pathogen. In some aspects, the exogenous pathogen comprises a virus. In some aspects, the virus comprises an influenza virus. In some aspects, the influenza virus comprises an influenza A virus, influenza B virus, or a combination thereof. In some aspects, the virus comprises a respiratory virus. In some aspects, the respiratory virus is an upper respiratory virus.

[0045] In some aspects, the detectable signal indicates presence of the virus in the sample. In some aspects, the method further comprises diagnosing a subject from which the sample was taken with the virus. In some aspects, the subject is a human. In some aspects, the sample is a buccal swab, a nasal swab, or urine. In some aspects, the reporter comprises a single stranded reporter comprising a detection moiety. In some aspects, the guide nucleic acid targets a plurality of target sequences.

[0046] In some aspects, the system comprises a plurality of guide sequences tiled against the virus. In some aspects, the plurality of target sequences comprises sequences from influenza A virus, influenza B virus, and a third pathogen. In some aspects, the single stranded reporter comprises the detection moiety at the 5′ end. In some aspects, the single stranded reporter comprises a biotin-dT/FAM moiety or a biotin-dT/ROX moiety. In some aspects, the single stranded reporter comprises a chemical functional handle at the 3′end capable of being conjugated to a substrate. In some aspects, the substrate is a magnetic bead.

[0047] In some aspects, the substrate is a surface of a reaction chamber. In some aspects, downstream of the reaction chamber is a test line. In some aspects, the test line comprises a streptavidin. In some aspects, downstream of the test line is a flow control line. In some aspects, the flow control line comprises an anti-IgG antibody. In some aspects, the anti-IgG antibody comprises an anti-rabbit IgG antibody.

[0048] In some aspects, the activated nuclease is capable of cleaving the single stranded reporter and releases the biotin-dT/FAM moiety or the biotin-dT/ROX moiety. In some aspects, the biotin-dT/FAM moiety is capable of binding the streptavidin at the test line. In some aspects, the reporter is an electroactive reporter. In some aspects, the electroactive reporter comprises biotin and methylene blue. In some aspects, the reporter is an enzyme-nucleic acid. In some aspects, the enzyme-nucleic acid is an invertase enzyme. In some aspects, an enzyme of the enzyme-nucleic acid is a sterically hindered enzyme. In some aspects, upon cleavage of a nucleic acid of the enzyme-nucleic acid, the enzyme is functional. In some aspects, the detectable signal is a colorimetric signal, a fluorescence signal, an amperometric signal, or a potentiometric signal. In some aspects, in any of the above systems, the respiratory virus is a lower respiratory virus. In some aspects, in any of the above methods, the respiratory virus is a lower respiratory virus.

[0049] In some aspects, a composition comprises a DNA-activated programmable RNA nuclease; and a guide nucleic acid comprising a segment that is reverse complementary to a segment of a target deoxyribonucleic acid, wherein the DNA-activated programmable RNA nuclease binds to the guide nucleic acid to form a complex. In some aspects, the composition further comprises an RNA reporter. In some aspects, the composition further comprises the target deoxyribonucleic acid from a virus. In some aspects, the target deoxyribonucleic acid is an amplicon of a nucleic acid. In some aspects, wherein the nucleic acid is a deoxyribonucleic acid or a ribonucleic acid. In some aspects, the DNA-activated programmable RNA nuclease is a Type VI CRISPR/Cas enzyme. In some aspects, the DNA-activated programmable RNA nuclease is a Cas13. In some aspects, the DNA-activated programmable RNA nuclease is a Cas13a. In some aspects, the Cas13a is Lbu-Cas13a or Lwa-Cas13a. In some aspects, the composition has a pH from pH 6.8 to pH 8.2. In some aspects, the target deoxyribonucleic acid lacks a guanine at the 3′ end. In some aspects, the target deoxyribonucleic acid is a single-stranded deoxyribonucleic acid. In some aspects, the composition further comprises a support medium. In some aspects, the composition further comprises a lateral flow assay device. In some aspects, the composition further comprises a device configured for fluorescence detection. In some aspects, the composition further comprises a second guide nucleic acid and a DNA-activated programmable DNA nuclease, wherein the second guide nucleic acid comprises a segment that is reverse complementary to a segment of a second target deoxyribonucleic acid comprising a guide nucleic acid. In some aspects, the composition further comprises a DNA reporter. In some aspects, the DNA-activated programmable DNA nuclease is a Type V CRISPR/Cas enzyme. In some aspects, the DNA-activated programmable DNA nuclease is a Cas12. In some aspects, the Cas12 is a Cas12a, Cas12b, Cas12c, Cas12d, or Cas12e. In some aspects, the DNA-activated programmable DNA nuclease is a Cas14. In some aspects, the Cas14 is a Cas 14a, Cas14b, Cas14c, Cas 14d, Cas 14e, Cas 14f, Cas 14g, or Cas 14h.

[0050] In some aspects, a method of assaying for a target deoxyribonucleic acid from a virus in a sample comprises contacting the sample to a complex comprising a guide nucleic acid and a DNA-activated programmable RNA nuclease, wherein the guide nucleic acid comprises a segment that is reverse complementary to a segment of the target deoxyribonucleic acid, and

[0051] assaying for a signal produced by cleavage of at least some RNA reporters of a plurality of RNA reporters. In some aspects, a method of assaying for a target ribonucleic acid from a virus in a sample comprises: amplifying a nucleic acid in a sample to produce a target deoxyribonucleic acid; contacting the target deoxyribonucleic acid to a complex comprising a guide nucleic acid and a DNA-activated programmable RNA nuclease, wherein the guide nucleic acid comprises a segment that is reverse complementary to a segment of the target deoxyribonucleic acid, and assaying for a signal produced by cleavage of at least some RNA reporters of a plurality of RNA reporters. In some aspects, the DNA-activated programmable RNA nuclease is a Type VI CRISPR nuclease. In some aspects, the DNA-activated programmable RNA nuclease is a Cas13. In some aspects, the Cas13 is a Cas13a. In some aspects, the Cas13a is Lbu-Cas13a or Lwa-Cas13a. In some aspects, cleavage of the at least some RNA reporters of the plurality of reporters occurs from pH 6.8 to pH 8.2. In some aspects, the target deoxyribonucleic acid lacks a guanine at the 3′ end. In some aspects, the target deoxyribonucleic acid is a single-stranded deoxyribonucleic acid. In some aspects, the target deoxyribonucleic acid is an amplicon of a ribonucleic acid. In some aspects, the target deoxyribonucleic acid or the ribonucleic acid is from an organism. In some aspects, the organism is a virus, bacteria, plant, or animal. In some aspects, the target deoxyribonucleic acid is produced by a nucleic acid amplification method. In some aspects, the nucleic acid amplification method is isothermal amplification. In some aspects, the nucleic acid amplification method is thermal amplification. In some aspects, the nucleic acid amplification method is recombinase polymerase amplification (RPA), transcription mediated amplification (TMA), strand displacement amplification (SDA), helicase dependent amplification (HDA), loop mediated amplification (LAMP), rolling circle amplification (RCA), single primer isothermal amplification (SPIA), ligase chain reaction (LCR), simple method amplifying RNA targets (SMART), or improved multiple displacement amplification (IMDA), or nucleic acid sequence-based amplification (NASBA). In some aspects, the signal is fluorescence, luminescence, colorimetric, electrochemical, enzymatic, calorimetric, optical, amperometric, or potentiometric. In some aspects, the method further comprises contacting the sample to a second guide nucleic acid and a DNA-activated programmable DNA nuclease, wherein the second guide nucleic acid comprises a segment that is reverse complementary to a segment of a second target deoxyribonucleic acid comprising a guide nucleic acid. In some aspects, the method further comprises assaying for a signal produced by cleavage of at least some DNA reporters of a plurality of DNA reporters. In some aspects, the DNA-activated programmable DNA nuclease is a Type V CRISPR nuclease. In some aspects, the DNA-activated programmable DNA nuclease is a Cas12. In some aspects, the Cas12 is a Cas12a, Cas12b, Cas12c, Cas12d, or Cas12e. In some aspects, the DNA-activated programmable DNA nuclease is a Cas14. In some aspects, the Cas14 is a Cas14a, Cas14b, Cas14c, Cas14d, Cas14e, Cas14f, Cas14g, or Cas14h. In some aspects, the guide nucleic acid comprises a crRNA. In some aspects, the guide nucleic acid comprises a crRNA and a tracrRNA. In some aspects, the signal is present prior to cleavage of the at least some RNA reporters. In some aspects, the signal is absent prior to cleavage of the at least some RNA reporters. In some aspects, the sample comprises blood, serum, plasma, saliva, urine, mucosal sample, peritoneal sample, cerebrospinal fluid, gastric secretions, nasal secretions, sputum, pharyngeal exudates, urethral or vaginal secretions, an exudate, an effusion, or tissue. In some aspects, the method is carried out on a support medium. In some aspects, the method is carried out on a lateral flow assay device. In some aspects, the method is carried out on a device configured for fluorescence detection.

[0052] In various aspects, the present disclosure provides a method of designing a plurality of primers for amplification of a target nucleic acid, the method comprising: providing a target nucleic acid, herein a guide nucleic acid hybridizes to the target nucleic acid and wherein at least 60% of a sequence of the target nucleic acid is between an F1c region and a B1 region or between an F1 and a B1c region; and designing the plurality of primers comprising: i) a forward inner primer comprising a sequence of the F1c region 5′ of a sequence of an F2 region; ii) a backward inner primer comprising a sequence of the B1c region 5′ of a sequence of a B2 region; iii) a forward outer primer comprising a sequence of an F3 region; and iv) a backward outer primer comprising a sequence of a B3 region.

[0053] In various aspects, the present disclosure provides a method of detecting a target nucleic acid in a sample, the method comprising: contacting the sample to: a plurality of primers comprising: i) a forward inner primer comprising a sequence corresponding to an F1c region 5′ of a sequence corresponding to an F2 region; ii) a backward inner primer comprising a sequence corresponding to a B1c region 5′ of a sequence corresponding to a B2 region; iii) a forward outer primer comprising a sequence corresponding to an F3 region; and iv) a backward outer primer comprising a sequence corresponding to a B3 region; a guide nucleic acid, wherein the guide nucleic acid hybridizes to the target nucleic acid and wherein at least 60% of a sequence of the target nucleic acid is between the F1c region and a B1 region or between an F1 region and the B1c region; a reporter; and a programmable nuclease that cleaves the reporter when complexed with the guide nucleic acid; and

[0054] measuring a detectable signal produced by cleavage of the reporter, wherein the measuring provides for detection of the target nucleic acid in the sample.

[0055] In some aspects, the sequence between the F1c region and the B1 region or the sequence between the B1c region and the F1 region is at least 50% reverse complementary to the guide nucleic acid sequence. In some aspects, the guide nucleic acid sequence is reverse complementary to no more than 50% of the forward inner primer, the backward inner primer, or a combination thereof. In some aspects, the guide nucleic acid does not hybridize to the forward inner primer and the backward inner primer.

[0056] In some aspects, a protospacer adjacent motif (PAM) or a protospacer flanking site (PFS) is 3′ of the target nucleic acid. In some aspects, a protospacer adjacent motif (PAM) or a protospacer flanking site (PFS) is 3′ of the B1 region and 5′ of the F1c region or the protospacer adjacent motif (PAM) or a protospacer flanking site (PFS) is 3′ of the Fl region and 5′ of the B1c region. In some aspects, the 3′ end of the target nucleic acid is 5′ of the 5′ end of the F3c region or the 3′ end of the target nucleic acid is 5′ of the 5′ end of the B3c region. In some aspects, the 3′ end of the target nucleic acid is 5′ of the 5′ end of the F2c region or 3′ end of the target nucleic acid is 5′ of the 5′ end of the B2c region. In some aspects, the target nucleic acid is between the F1c region and the B1 region and the 3′ end of the target nucleic acid is 5′ of the 3′ end of the F2c region, or wherein the target nucleic acid is between the B1c region and the F1 region and the 3′ end of the target nucleic acid is 5′ of the 3′ end of the B2c region.

[0057] In some aspects, the guide nucleic acid has a sequence reverse complementary to no more than 50% of the forward inner primer, the backward inner primer, the forward outer primer, the backward outer primer, or any combination thereof. In some aspects, the guide nucleic acid sequence does not hybridize to the forward inner primer, the backward inner primer, the forward outer primer, the backward outer primer, or any combination thereof.

[0058] In some aspects, the guide nucleic acid sequence has a sequence reverse complementary to no more than 50% of a sequence of an F3c region, an F2c region, the F1c region, the B1c region, an B2c region, an B3c region, or any combination thereof. In some aspects, the guide nucleic acid sequence does not hybridize to a sequence of an F3c region, an F2c region, the F1c region, the B1c region, an B2c region, an B3c region, or any combination thereof.

[0059] In various aspects, the present disclosure provides a method of designing a plurality of primer for amplification of a target nucleic acid, the method comprising: providing the target nucleic acid comprising a sequence between a B2 region and a B1 region or between an F2 region and an F1 region that hybridizes to a guide nucleic acid; and designing the plurality of primers comprising: i) a forward inner primer comprising a sequence of the F1c region 5′ of a sequence of an F2 region; ii) a backward inner primer comprising a sequence of the B1c region 5′ of a sequence of a B2 region; iii) a forward outer primer comprising a sequence of an F3 region; and iv) a backward outer primer comprising a sequence of a B3 region.

[0060] In various aspects, the present disclosure provides a method of designing a plurality of primer for amplification of a target nucleic acid, the method comprising: providing the target nucleic acid comprising a sequence between a F1c region and an F2c region or between a B1c region and a B2c region that hybridizes to a guide nucleic acid; and designing the plurality of primers comprising: i) a forward inner primer comprising a sequence of the F1c region 5′ of a sequence of an F2 region; ii) a backward inner primer comprising a sequence of the B1c region 5′ of a sequence of a B2 region; iii) a forward outer primer comprising a sequence of an F3 region; and iv) a backward outer primer comprising a sequence of a B3 region.

[0061] In various aspects, the present disclosure provides a method of detecting a target nucleic acid in a sample, the method comprising: contacting the sample to: a plurality of primers comprising: i) a forward inner primer comprising a sequence corresponding to an F1c region 5′ of a sequence corresponding to an F2 region; ii) a backward inner primer comprising a sequence corresponding to a B1c region 5′ of a sequence corresponding to a B2 region; iii) a forward outer primer comprising a sequence corresponding to an F3 region; and iv) a backward outer primer comprising a sequence corresponding to a B3 region; a guide nucleic acid, wherein the target nucleic acid comprises a sequence between a B2 region and a B1 region or between the F2 region and an F1 region that hybridizes to the guide nucleic acid; a reporter; and a programmable nuclease that cleaves the reporter when complexed with the guide nucleic acid; and measuring a detectable signal produced by cleavage of the reporter, wherein the measuring provides for detection of the target nucleic acid in the sample.

[0062] In various aspects, the present disclosure provides a method of detecting a target nucleic acid in a sample, the method comprising: contacting the sample to: a plurality of primers comprising: i) a forward inner primer comprising a sequence corresponding to an F1c region 5′ of a sequence corresponding to an F2 region; ii) a backward inner primer comprising a sequence corresponding to a B1c region 5′ of a sequence corresponding to a B2 region; iii) a forward outer primer comprising a sequence corresponding to an F3 region; and iv) a backward outer primer comprising a sequence corresponding to a B3 region; a guide nucleic acid, wherein the target nucleic acid comprises a sequence between the F1c region and an F2c region or between the B1c region and a B2c region that hybridizes to the guide nucleic acid; a reporter; and a programmable nuclease that cleaves the reporter when complexed with the guide nucleic acid; and measuring a detectable signal produced by cleavage of the reporter, wherein the measuring provides for detection of the target nucleic acid in the sample.

[0063] In some aspects, a protospacer adjacent motif (PAM) or a protospacer flanking site (PFS) is 3′ of the B2 region and 5′ of the B1 region or the protospacer adjacent motif (PAM) or a protospacer flanking site (PFS) is 3′ of the F2 region and 5′ of the F1 region. In some aspects, a protospacer adjacent motif (PAM) or a protospacer flanking site (PFS) is 3′ of the B1c region and 5′ of the B2c region or the protospacer adjacent motif (PAM) or a protospacer flanking site (PFS) is 3′ of the F1c region and 5′ of the F2c region.

[0064] In some aspects, a protospacer adjacent motif (PAM) or a protospacer flanking site (PFS) is 3′ of the target nucleic acid. In some aspects, the PAM and the PFS are 5′ of the 5′ end of the F1c region, 5′ of the 5′ end of the B1c region, 3′ of the 3′ end of the F3 region, 3′ of the 3′ end of the B3 region, 3′ of the 3′ end of the F2 region, 3′ of the 3′ end of the B2 region, or any combination thereof

[0065] In some aspects, the PAM and the PFS do not overlap the F2 region, the B3 region, the F1c region, the F2 region, the B1c region, the B2 region, or any combination thereof. In some aspects, the PAM and the PFS do not hybridize to the forward inner primer, the backward inner primer, the forward outer primer, the backward outer primer, or any combination thereof.

[0066] In some aspects, the plurality of primers further comprises a loop forward primer. In some aspects, the plurality of primers further comprises a loop backward primer. In some aspects, the loop forward primer is between an F1c region and an F2c region. In some aspects, the loop backward primer is between a B1c region and a B2c region.

[0067] In some aspects, the target nucleic acid comprises a single nucleotide polymorphism (SNP). In some aspects, the single nucleotide polymorphism (SNP) comprises a HERC2 SNP. In some aspects, the single nucleotide polymorphism (SNP) is associated with an increased risk or decreased risk of cancer. In some aspects, the target nucleic acid comprises a single nucleotide polymorphism (SNP), and wherein the detectable signal is higher in the presence of a guide nucleic acid that is 100% complementary to the target nucleic acid comprising the single nucleotide polymorphism (SNP) than in the presence of a guide nucleic acid that is less than 100% complementary to the target nucleic acid comprising the single nucleotide polymorphism (SNP).

[0068] In some aspects, the plurality of primers and the guide nucleic acid are present together in a sample comprising the target nucleic acid. In some aspects, the contacting the sample to the plurality of primers results in amplifying the target nucleic acid. In some aspects, the amplifying and the contacting the sample to the guide nucleic acid occurs at the same time. In other aspects, the amplifying and the contacting the sample to the guide nucleic acid occur at different times. In some aspects, the method further comprises providing a polymerase, a dATP, a dTTP, a dGTP, a dCTP, or any combination thereof.

[0069] In some aspects, the target nucleic acid is from a virus. In some aspects, the virus comprises an influenza virus, respiratory syncytial virus, or a combination thereof. In further aspects, the influenza virus comprises an influenza A virus, influenza B virus, or a combination thereof. In some aspects, the virus comprises a respiratory virus. In further aspects, the respiratory virus is an upper respiratory virus.

[0070] In some aspects, the system further comprises a forward inner primer, a backward inner primer, a forward outer primer, a backward outer primer, a loop forward primer, a loop backward primer, or any combination thereof. In some aspects, method further comprising contacting the sample with a forward inner primer, a backward inner primer, a forward outer primer, a backward outer primer, a loop forward primer, a loop backward primer, or any combination thereof. In some aspects, method further comprising amplifying the target deoxyribonucleic acid with a forward inner primer, a backward inner primer, a forward outer primer, a backward outer primer, a loop forward primer, a loop backward primer, or any combination thereof. In some aspects, the amplifying comprises contacting the sample to a forward inner primer, a backward inner primer, a forward outer primer, a backward outer primer, a loop forward primer, a loop backward primer, or any combination thereof.

### INCORPORATION BY REFERENCE

[0071] All publications, patents, and patent applications mentioned in this specification are herein incorporated by reference to the same extent as if each individual publication, patent, or patent application was specifically and individually indicated to be incorporated by reference.

### BRIEF DESCRIPTION OF THE DRAWINGS

[0072] The patent or application file contains at least one drawing executed in color. Copies of this patent or patent application publication with color drawing(s) will be provided by the Office upon request and payment of the necessary fee. The novel features of the disclosure are set forth with particularity in the appended claims. A better understanding of the features and advantages of the present disclosure will be obtained by reference to the following detailed description that sets forth illustrative embodiments, in which the principles of the disclosure are utilized, and the accompanying drawings of which:

[0073] FIG. 1 shows a schematic illustrating a workflow of a CRISPR-Cas reaction. Step 1 shown in the workflow is sample preparation, Step 2 shown in the workflow is nucleic acid amplification. Step 3 shown in the workflow is Cas reaction incubation. Step 4 shown in the workflow is detection (readout). Non-essential steps are shown as oval circles. Steps 1 and 2 are not essential, and steps 3 and 4 can occur concurrently, if detection and readout are incorporated to the CRISPR reaction.

[0074] FIG. 2 shows an example fluidic device for sample preparation that may be used in Step 1 of the workflow schematic of FIG. 1. The sample preparation fluidic device shown in this figure can process different types of biological sample: finger-prick blood, urine or swabs with fecal, cheek or other collection.

[0075] FIG. 3 shows three example fluidic devices for a Cas reaction with a fluorescence or electrochemical readout that may be used in Step 2 to Step 4 of the workflow schematic of FIG. 1. This figure shows that the device performs three iterations of Steps 2 through 4 of the workflow schematic of FIG. 1.

[0076] FIG. 4 shows schematic diagrams of a readout process that may be used including (a) fluorescence readout and (b) electrochemical readout.

[0077] FIG. 5 shows an example fluidic device for coupled invertase/Cas reactions with colorimetric or electrochemical/glucometer readout. This diagram illustrates a fluidic device for miniaturizing a Cas reaction coupled with the enzyme invertase. Surface modification and readout processes are depicted in exploded view schemes at the bottom including (a) optical readout using DNS, or other compound and (b) electrochemical readout (electrochemical analyzer or glucometer).

[0078] FIG. 6A shows a panel of gRNAs for RSV evaluated for detection efficiency. Darker squares in the background subtracted row indicate greater efficiency of detecting RSV target nucleic acids.

[0079] FIG. 6B shows graphs of pools of gRNA versus background subtracted fluorescence.

[0080] FIG. 7 shows individual parts of sample preparation devices of the present disclosure.

[0081] FIG. 8 shows a sample work flow using a sample processing device.

[0082] FIG. 9 shows extraction buffers used to extract Influenza A RNA from remnant clinical samples.

[0083] FIG. 10 shows that low pH conditions allow for rapid extraction of Influenza A genomic RNA.

[0084] FIG. 11 shows the application of RT-RPA to the detection of Influenza A, Influenza B, and human Respiratory Syncytial Virus (RSV) viral RNA by Cas12a. The schematic at left shows the workflow including providing DNA/RNA, RPA/RT-RPA, and Cas12a detection. The graphs at right show the results of Cas12a detection as measured by fluorescence over time.

[0085] FIG. 12 shows the application of RT-RPA coupled with an IVT reaction enabling detection of viral RNA using Cas13a. The schematic at left shows the workflow including providing DNA/RNA, RPA/RT-RPA, in vitro transcription, and Cas13a detection. The graph at right shows the results of Cas13a detection as measured by fluorescence for each tested condition.

[0086] FIG. 13 shows the production of RNA, as detected by Cas13a, from an RNA virus using an RT-RPA-IVT “two-pot” reaction. The schematic at left shows the workflow including providing DNA/RNA, the “two-pot” reaction including RPA/RT-RPA and in vitro transcription in a first reaction, and Cas13a detection in a second reaction. The graph at right shows the results of Cas13a detection as measured by fluorescence for each tested condition.

[0087] FIG. 14 shows the effect of various buffers on the performance of a one-pot Cas13a assay. The schematic at left shows the workflow including providing DNA/RNA and RPA/RT-RPA, in vitro transcription, and Cas13a detection. The graph at right shows the results of Cas13a detection as measured by fluorescence for each tested condition.

[0088] FIG. 15 shows the specific detection of viral RNA from the Peste des petits ruminants (PPR) virus that infects goats using the one-pot Cas13a assay. The schematic at left shows the workflow including providing DNA/RNA and RPA/RT-RPA, in vitro transcription, and Cas13a detection. The graphs at right show the results of Cas13a detection as measured by fluorescence over time for the tested conditions.

[0089] FIG. 16 shows the specific detection of Influenza B using the one-pot Cas13a assay run at 40° C. 40 fM of viral RNA was added to the reaction. The schematic at left shows the workflow including providing DNA/RNA and RPA/RT-RPA, in vitro transcription, and Cas13a detection. The graphs at right show the results of Cas13a detection as measured by fluorescence for each tested condition.

[0090] FIG. 17 shows the tolerance of the one-pot Cas13a assay for the detection of RNA from the Influenza B virus in the presence and in the absence of a universal viral transport medium called universal transport media (UTM Copan) at 40° C. The schematic at left shows the workflow including providing DNA/RNA and RPA/RT-RPA, in vitro transcription, and Cas13a detection. The graphs at right show the results of Cas13a detection as measured by fluorescence over time for each tested condition.

[0091] FIGS. 18A-18D show the one-pot Cas13a detection assay at various temperatures.

[0092] FIG. 18A shows a schematic of the workflow including providing DNA/RNA and the one-pot reaction including RPA/RT-RPA, in vitro transcription, and Cas13a detection.

[0093] FIG. 18B shows a graph of Cas13a detection of Influenza A RNA at various temperatures.

[0094] FIG. 18C shows a graph of Cas13a detection of Influenza B RNA at various temperatures.

[0095] FIG. 18D shows a graph of Cas13a detection of human RSV RNA at various temperatures.

[0096] FIGS. 19A-19C show the optimization of a LAMP reaction for the detection of an internal amplification control using a DNA sequence derived from the Mammuthus primigenius (Wooly Mammoth) mitochondria.

[0097] FIG. 19A shows a schematic of the workflow including providing DNA/RNA, LAMP/RT-LAMP, and Cas12a detection.

[0098] FIG. 19B shows the time to result for LAMP reactions for an internal amplification control using a DNA sequence derived from the Mammuthus primigenius, as quantified by fluorescence.

[0099] FIG. 19C shows Cas12a specific detection at 37° C. of LAMP amplicon from the 68° C. temperature reaction.

[0100] FIGS. 20A-20C show the optimization of LAMP and Cas12 specific detection of the human POP7 gene that is a component of RNase P (SEQ ID NO: 379,

GGAGTATTGAATAGTTGGGAATTGGAACCCCTCCAGGGGGAACCAAACAT
TGTCGTTCAGAAGAAGACAAAGAGAGATTGAAATGAAGCTGTTGATTTCA
ACACACAAATTCTGGTGGTAGATGAAAGCAAAGCAAGTAAGTTTCTCCGA
ATCCCTAGTCAACTGGAGGTAGAGACGGACTGCGCAGGTTAACTACAGCT
CCCAGCATGCCTGAGGGGCGGGCTCAGCGGCTGCGCAGACTGGCGCGCGC
GGACGGTCATGGGACTTCAGCATGGCGGTGTTTGCAGATTTGGACCTGCG
AGCGGGTTCTGACCTGAAGGCTCTGCGCGGACTTGTGGAGACAGCCGCTC
ACCTTGGCTATTCAGTTGTTGCTATCAATCATATCGTTGACTTTAAGGAA
AAGAAACAGGAAATTGAAAAACCAGTAGCTGTTTCTGAACTCTTCACAAC
TTTGCCAATTGTACAGGGAAAATCAAGACCAATTAAAATTTTAACTAGAT
TAACAATTATTGTCTCGGATCCATCTCACTGCAATGTTTTGAGAGCAACT
TCTTCAAGGGCCCGGCTCTATGATGTTGTTGCAGTTTTTCCAAAGACAGA
AAAGCTTTTTCATATTGCTTGCACACATTTAGATGTGGATTTAGTCTGCA
TAACTGTAACAGAGAAACTACCATTTTACTTCAAAAGACCTCCTATTAAT
GTGGCGATTGACCGAGGCCTGGCTTTTGAACTTGTCTATAGCCCTGCTAT
CAAAGACTCCACAATGAGAAGGTATACAATTTCCAGTGCCCTCAATTTGA
TGCAAATCTGCAAAGGAAAGAATGTAATTATATCTAGTGCTGCAGAAAGG
CCTTTAGAAATAAGAGGGCCATATGACGTGGCAAATCTAGGCTTGCTGTT
TGGGCTCTCTGAAAGTGACGCCAAGGCTGCGGTGTCCACCAACTGCCGAG
CAGCGCTTCTCCATGGAGAAACTAGAAAAACTGCTTTTGGAATTATCTCT
ACAGTGAAGAAACCTCGGCCATCAGAAGGAGATGAAGATTGTCTTCCAGC
TTCCAAGAAAGCCAAGTGTGAGGGCTGAAAAGAATGCCCCAGTCTCTGTC
AGCACTCCCTTCTTCCCTTTTATAGTTCATCAGCCACAACAAAAATAAAA
CCTTTGTGTGATTTACTGTTTTCATTTGGAGCTAGAAATCAATAGTCTAT
AAAAACAGTTTTACTTGCAATCCATTAAAACAACAAACGAAACCTAGTGA
AGCATCTTTTTAAAAGGCTGCCAGCTTAATGAATTTAGATGTACTTTAAG
AGAGAAAGACTGGTTATTTCTCCTTTGTGTAAGTGATAAACAACAGCAAA
TATACTTGAATAAAATGTTTCAGGTATTTTTGTTTCATTTTGTTTTTGAG
ATAGGGTCTTTGTTGCTCAGGCTGGAGTACAGTGGCATAATCACAGCTCA
CTGCAACCTCAATCCTGGGCTCAAGTGATCCTCCCGCTTCAGCCTCTCAA
GCAGCGGGAACTACAGGTGTGCACTACCACACCTGGCTATTTTTTTTTTT
TTTTTTTTTTTCCCTTGTAGAGACATGGTCTCACTATGTTGCTGAGGCTG
GTCTCAAACTCCTAGGATCAAGCCATCCTCCCGCTTTGGCCTCCTAAAGT
GCTGGGATTACATGAGCCACCACATGCAGCCAGATGTTTGAATATTTTAA
GAGCTTCTTTCGAAAGTTTCTTGTTCATACTCAAATAGTAGTTATTTTGA
AGATATTCAAACTTATATTGAAGAAGTGACTTTAGTTCCTCTTGTTTTAA
GCTTCTTTCATGTATTCAAATCAGCATTTTTTTCTAAGAAATTGCTATAG
AATTTGTGGAAGGAGAGAGGATACACATGTAAAATTACATCTGGTCTCTT
CCTTCACTGCTTCATGCCTACGTAAGGTCTTTGAAATAGGATTCCTTACT
TTTAGTTAGAAACCCCTAAAACGCTAATATTGATTTTCCTGATAGCTGTA
TTAAAAATAGCAAAGCATCGGACTGA).

[0101] FIG. 20A shows a schematic of the workflow including providing DNA/RNA, LAMP/RT-LAMP, and Cas12a detection.

[0102] FIG. 20B shows the time to result of a LAMP/RT-LAMP reaction for RNase P POP7 at different temperatures, as quantified by fluorescence.

[0103] FIG. 20C shows three graphs demonstrating Cas12a specific detection at 37° C. of LAMP/RT-LAMP amplicon from the 68° C. temperature reaction.

[0104] FIG. 21 shows the specific detection of three different RT-LAMP amplicons for Influenza A virus. At left is a schematic of the workflow including providing DNA/RNA, LAMP/RT-LAMP, and Cas12a detection. At right are graphs showing the results of Cas12a detection as measured by fluorescence over time for each tested condition.

[0105] FIG. 22 shows the identification of optimal crRNAs for the specific detection of Influenza B (IBV) RT-LAMP amplicons. At left is a schematic of the workflow including providing DNA/RNA, LAMP/RT-LAMP, and Cas12a detection. At right are graphs showing the results of Cas12a detection as measured by fluorescence over time for each tested condition (IAV is influenza A virus, IBV is influenza B virus, NTC is no template control).

[0106] FIG. 23 shows the results of the 1% agarose gel with bands showing the products of the RT-LAMP reaction.

[0107] FIGS. 24A-24C show Cas12a discrimination between amplicons from a multiplex RT-LAMP reaction for Influenza A and Influenza B.

[0108] FIG. 24A shows a schematic of the workflow including providing viral RNA, multiplexed RT-LAMP, and Cas12a influenza A detection or Cas12a influenza B detection.

[0109] FIG. 24B shows Cas12a detection of RT-LAMP amplicons after 30 minute multiplexed RT-LAMP amplification at 60° C.

[0110] FIG. 24C shows background subtracted fluorescence at 30 minutes of Cas12a detection at 37° C. of RT-LAMP amplicons for 10,000 viral genome copies of IAV and IBV.

[0111] FIG. 25 shows Cas12a discrimination between a triple multiplexed RT-LAMP reaction for Influenza A, Influenza B, and the Mammuthus primigenius (Wooly Mammoth) mitochondria internal amplification control sequence after 30 minutes of multiplexed RT-LAMP amplification at 60° C. At top is a schematic of the worrkflow including providing viral RNA, multiplexed RT-LAMP, and Cas12a influenza A detection or Cas12a influenza B detection or Cas12 internal amplification control detection. At bottom are graphs showing the results of Cas12 detection as measured by fluorescence over time for each tested condition.

[0112] FIGS. 26A-26B show schematics of LAMP and RT-LAMP primer designs.

[0113] FIG. 26A shows a schematic illustrating the identity of the primers used in LAMP and RT-LAMP. Primers LF and LB are option in some LAMP and RT-LAMP designs, but generally increase the efficiency of the reaction.

[0114] FIG. 26B shows a schematic illustrating the position and orientation of the T7 promoter in a variety of LAMP primers.

[0115] FIG. 27 shows that a T7 promoter can be included on the F3 or B3 primers (outer primers), or FIP or BIP primers for Influenza A.

[0116] FIG. 27A shows a schematic of the workflow including providing DNA/RNA, LAMP/RT-LAMP, in vitro transcription, and Cas13a detection.

[0117] FIG. 27B shows the time to result for RT-LAMP reactions for Influenza A using different primer sets, as quantified by fluorescence.

[0118] FIG. 27C shows in vitro transcription (IVT) with T7 RNA polymerase of the product of the RT-LAMP reactions for Influenza A using different primer sets at 37° C. for 10 minutes.

[0119] FIG. 28 shows the detection of a RT-SIBA amplicon for Influenza A by Cas12. At left is a schematic of the workflow including providing DNA/RNA, SIBA/RT-SIBA, and Cas12a detection. At right is a graph showing Cas12a detection as measured by fluorescence for each of the tested conditions.

[0120] FIG. 29 shows the layout of a Milenia commercial strip with a typical reporter.

[0121] FIG. 30 shows the layout of a Milenia HybridDetect 1 strip with an amplicon.

[0122] FIG. 31 shows the layout of a Milenia HybridDetect 1 strip with a standard Cas reporter.

[0123] FIG. 32 shows a modified Cas reporter comprising a DNA linker to biotin-dT (shown as a pink hexagon) bound to a FAM molecule (shown as a green start).

[0124] FIG. 33 shows the layout of Milenia HybridDetect strips with the modified Cas reporter.

[0125] FIG. 34 shows an example of a single target assay format (to left) and a multiplexed assay format (to right).

[0126] FIG. 35 shows another variation of an assay prior to use (top), an assay with a positive result (middle left), an assay with a negative result (middle right), and a failed test (bottom).

[0127] FIG. 36 shows one design of a tethered lateral flow Cas reporter.

[0128] FIG. 37 shows a workflow for CRISPR diagnostics using the tethered cleavage reporter using magnetic beads.

[0129] FIG. 38 shows a schematic for an enzyme-reporter system that is filtered by streptavidin-biotin before reaching the reaction chamber.

[0130] FIG. 39 shows an invertase-nucleic acid used for the detection of a target nucleic acid. The invertase-nucleic acid, immobilized on a magnetic bead, is added to a sample reaction containing Cas protein, guide RNA, and a target nucleic acid. Target recognition activates the Cas protein to cleave the nucleic acid of the invertase-nucleic acid, liberating the invertase enzyme from the immobilized magnetic bead. This solution is either be transferred to the “reaction mix”, which contains sucrose and the DNS reagent and changes color from yellow to red when the invertase converts sucrose to glucose or is can be transferred to a hand-held glucometer device for a digital readout.

[0131] FIG. 40 shows one layout for a two-pot DETECTR assay. In this layout a swab collection cap seals a swab reservoir chamber. Clockwise to the swab reservoir chamber is a chamber holding the amplification reaction mix. Clockwise to the chamber holding the amplification reaction mix is a chamber holding the DETECTR reaction mix. Clockwise to this is the detection area. Clockwise to the detection area is the pH balance well. A cartridge wells cap is shown and seals all the wells containing the various reagent mixtures. The cartridge itself is shown as a square layer at the bottom of the schematic. To the right is a diagram of the instrument pipers pump which drives the fluidics in each chamber/well and is connected to the entire cartridge. Below the cartridge is a rotary valve that interfaces with the instrument.

[0132] FIG. 41 shows one workflow of the various reactions in the two-pot DETECTR assay of FIG. 40. First, as shown in the top left diagram, a swab may be inserted into the 200 ul swab chamber and mixed. In the middle left diagram, the valve is rotated clockwise to the “swab chamber position” and 1 uL of sample is picked up. In the lower left diagram, the valve is rotated clockwise to the “amplification reaction mix” position and the 1 ul of sample is dispensed and mixed. In the top right diagram, 2 uL of sample is aspirated from the “amplification reaction mix”. In the top middle diagram, the valve is roated clockwise to the “DETECTR” position, the sample is dispensed and mixed, and 20 ul of the sample is aspirated. Finally, in the bottom right diagram, the valve is rotated clockwise to the detection area position and 20 ul of the sample is dispensed.

[0133] FIG. 42 shows a modification of the workflow shown in FIG. 41 that is also consistent with the methods and systems of the present disclosure. At left is the diagram shown at the top right of FIG. 41. At right is the modifed diagram in which there is a first amplification chamber counterclockwise to the swab lysis chamber and a second amplification chamber clockwise to the swab lysis chamber. Additionally, clockwise to amplification chamber #2 are two sets, or “duplex”, DETECTR chambers labeled “Duplex DETECTR Chambers #2” and “Duplex DETECTR Chambers #1”, respectively.

[0134] FIG. 43 shows breakdown of the workflow for the modified layout shown in FIG. 42. Specifically, from the swab lysis chamber, which holds 200 ul of sample, 20 ul of the sample can be moved to amplification chmaber #1 and 20 ul of the sample can be moved to amplification chamber #2. After amplification in amplification chamber #1, 20 ul of the sample can be moved to Duplex DETECTR Chambers #1a and 20 ul of the sample can be moved to Duplex DETECTR Chambers #1b. Additionally, after amplification in amplification chamber #2, 20 ul of the sample can be moved to Duplex DETECTR Chambers #2a and 20 ul of the sample can be moved to Duplex DETECTR Chambers #2b.

[0135] FIG. 44 shows the modifications to the cartridge illustrated in FIG. 43 and FIG. 42.

[0136] FIG. 45 shows a top down view of the cartridge of FIG. 44. This layout and workflow has a replicate in comparison to the layout and workflow of FIGS. 40-41.

[0137] FIG. 46 shows a layout for a two-pot DETECTR assay. Shown at top is a pneumatic pump, which interfaces with the cartridge. Shown at middle is a top down view of the cartridge showing a top layer with reservoirs. Shown at bottom is a sliding valve containing the sample and arrows pointing to the lysis chamber at left, following by amplification chambers to the right, and DETECT chambers further to the right.

[0138] FIG. 47 shows a comparison of the DETECTR assays disclosed herein to the gold standard PCR-based method of detecting a target nucleic acid. Shown is a flow chart showing a gradient of sample prep evaluation from crude (left) to pure (right). Sample prep steps that take a crude sample to a pure sample include lysis, binding, washing, and eluting. DETECTR assays disclosed herein may only need the sample prep step of lysis, yielding a crude sample. On the other hand, PCR-based methods can require lysis, binding, washing, and elution, yielding a very pure sample.

[0139] FIGS. 48A-48C show Cas13a detection of target RT-LAMP DNA amplicon.

[0140] FIG. 48A shows a schematic of the workflow including providing DNA/RNA, LAMP/RT-LAMP, and Cas13a detection.

[0141] FIG. 48B shows Cas13a specific detection of target RT-LAMP DNA amplicon with a first primer set as measured by background subtracted fluorescence on the y-axis.

[0142] FIG. 48C shows Cas13a specific detection of target RT-LAMP DNA amplicon with a second primer set as measured by background subtracted fluorescence on the y-axis.

[0143] FIG. 49A shows a Cas13 detection assay using 2.5 nM RNA, single-stranded DNA (ssDNA), or double-stranded (dsDNA) as target nucleic acids, where detection was measured by fluorescence for each of the target nucleic acid tested.

[0144] FIG. 49B shows Cas12 detection assay using 2.5 nM RNA, ssDNA, and dsDNA as target nucleic acids, where detection was measured by fluorescence for each of the target nucleic acid tested.

[0145] FIG. 49C shows the performance of Cas13 and Cas12 on target RNA, target ssDNA, and target dsDNA at various concentrations, where detection was measured by fluorescence for each of the target nucleic tested.

[0146] FIG. 50 shows an LbuCas13a detection assay using 2.5 nM target ssDNA with 170 nM of various reporter substrates, wherein detection was measured by fluorescence for each of the reporter substrates tested.

[0147] FIG. 51A shows the results of Cas13 detection assays for LbuCas13a (SEQ ID NO: 131) and LwaCas13a (SEQ ID NO: 137) using 10 nM or 0 nM of target RNA, where detection was measured by fluorescence resulting from cleavage of reporters over time.

[0148] FIG. 51B shows the results of Cas13 detection assays for LbuCas13a (SEQ ID NO: 131) and LwaCas13a (SEQ ID NO: 137) using 10 nM or 0 nM of target ssDNA, where detection was measured by fluorescence resulting from cleavage of reporters over time.

[0149] FIG. 52 shows LbuCas13a (SEQ ID NO: 131) detection assay using 1 nM target RNA (at left) or target ssDNA (at right) in buffers with various pH values ranging from 6.8 to 8.2.

[0150] FIG. 53A shows guide RNAs (gRNAs) tiled along a target sequence at 1 nucleotide intervals.

[0151] FIG. 53B shows LbuCas13a (SEQ ID NO: 131) detection assays using 0.1 nM RNA or 2 nM target ssDNA with gRNAs tiled at 1 nucleotide intervals and an off-target gRNA.

[0152] FIG. 53C shows data from FIG. 97B ranked by performance of target ssDNA.

[0153] FIG. 53D shows performance of gRNAs for each nucleotide on a 3′ end of a target RNA.

[0154] FIG. 53E shows performance of gRNAs for each nucleotide on a 3′ end of a target ssDNA.

[0155] FIG. 54A shows LbuCas13a detection assays using 1 μL of target DNA amplicon from various LAMP isothermal nucleic acid amplification reactions.

[0156] FIG. 54B shows LbuCas13a (SEQ ID NO: 131) detection assays using various amounts of PCR reaction as a target DNA.

[0157] FIG. 55 shows a pneumatic valve device layout for a DETECTR assay.

[0158] FIG. 55A shows a schematic of a pneumatic valve device. A pipette pump aspirates and dispenses samples. An air manifold is connected to a pneumatic pump to open and close the normally closed valve. The pneumatic device moves fluid from one position to the next. The pneumatic design has reduced channel cross talk compared to other device designs.

[0159] FIG. 55B shows a schematic of a cartridge for use in the quake valve pneumatic device shown in FIG. 55A. The valve configuration is shown. The normally closed valves (one such valve is indicated by an arrow) comprise an elastomeric seal on top of the channel to isolate each chamber from the rest of the system when the chamber is not in use. The pneumatic pump uses air to open and close the valve as needed to move fluid to the necessary chambers within the cartridge.

[0160] FIG. 56 shows a valve circuitry layout for the pneumatic valve device shown in FIG. 55A. A sample is placed in the sample well while all valves are closed, as shown at (i.). The sample is lysed in the sample well. The lysed sample is moved from the sample chamber to a second chamber by opening the first quake valve, as shown at (ii.), and aspirating the sample using the pipette pump. The sample is then moved to the first amplification chamber by closing the first quake valve and opening a second quake valve, as shown at (iii.) where it is mixed with the amplification mixture. After the sample is mixed with the amplification mixture, it is moved to a subsequent chamber by closing the second quake valve and opening a third quake valve, as shown at (iv). The sample is moved to the DETECTR chamber by closing the third quake valve and opening a fourth quake valve, as shown at (v). The sample can be moved through a different series of chambers by opening and closing a different series of normally open (e.g., quake type) valves, as shown at (vi). Actuation of individual valves in the desired chamber series prevents cross contamination between channels.

[0161] FIG. 57 shows a schematic of a sliding valve device. The offset pitch of the channels allows aspirating and dispensing into each well separately and helps to mitigate cross talk between the amplification chambers and corresponding chambers.

[0162] FIG. 58 shows a diagram of sample movement through the sliding valve device shown in FIG. 57. In the initial closed position (i.), the sample is loaded into the sample well and lysed. The sliding valve is then actuated by the instrument, and samples are loaded into each of the channels using the pipette pump, which dispenses the appropriate volume into the channel (ii.). The sample is delivered to the amplification chambers by actuating the sliding valve and mixed with the pipette pump (iii.). Samples from the amplification chamber are aspirated into each channel (iv.) and then dispensed and mixed into each DETECTR chamber (v.) by actuating the sliding valve and pipette pump.

[0163] FIG. 59 shows a schematic of the top layer of a cartridge of a pneumatic valve device of the present disclosure, highlighting suitable dimensions. The schematic shows one cartridge that is 2 inches by 1.5 inches.

[0164] FIG. 60 shows a schematic of a modified top layer of a cartridge of a pneumatic valve device of the present disclosure adapted for electrochemical dimension. In this schematic, three lines are shown in the detection chambers (4 chambers at the very right). These three lines represent wiring (or “metal leads”), which is co-molded, 3D-printed, or manually assembled in the disposable cartridge to form a three-electrode system.

[0165] FIG. 61 shows schemes for designing primers for loop mediated isothermal amplification (LAMP) of a target nucleic acid sequence. Regions denoted by “c” are reverse complementary to the corresponding region not denoted by “c” (e.g., region F3c is reverse complementary to region F3).

[0166] FIGS. 62A-62D show schematics of exemplary configurations of various regions of a nucleic acid sequence that correspond to or anneal LAMP primers, or guide RNA sequences, or that comprise protospacer-adjacent motif (PAM) or protospacer flanking site (PFS), and target nucleic acid sequences for amplification and detection by LAMP and DETECTR.

[0167] FIG. 62A shows a schematic of an exemplary arrangement of the guide RNA (gRNA) with respect to the various regions of the nucleic acid sequence that correspond to or anneal LAMP primers. In this arrangement, the guide RNA is reverse complementary to a sequence of the target nucleic acid, which is between an F1c region (i.e., a region reverse complementary to an F1 region) and a B1 region.

[0168] FIG. 62B shows a schematic of an exemplary arrangement of the guide RNA sequence with respect to the various regions of the nucleic acid sequence that correspond to or anneal LAMP primers. In this arrangement, the guide RNA is partially reverse complementary to a sequence of the target nucleic acid, which is between an F1c region and a B1 region. For example, the target nucleic acid comprises a sequence between an F1c region and a B1 region that is reverse complementary to at least 60% of a guide nucleic acid. In this arrangement, the guide RNA is not reverse complementary to the forward inner primer or the backward inner primer shown in FIG. 40.

[0169] FIG. 62C shows a schematic of an exemplary arrangement of the guide RNA with respect to the various regions of the nucleic acid sequence that correspond to or anneal LAMP primers. In this arrangement, the guide RNA hybridizes to a sequence of the target nucleic acid, which is within the loop region between the B1 region and the B2 region. The forward inner primer, backward inner primer, forward outer primer, and backward outer primer sequences do not contain and are not reverse complementary to the PAM or PFS.

[0170] FIG. 62D shows a schematic of an exemplary arrangement of the guide RNA with respect to the various regions of the nucleic acid sequence that correspond to or anneal LAMP primers. In this arrangement, the guide RNA hybridizes to a sequence of the target nucleic acid, which is within the loop region between the F2c region and F1c region. The primer sequences do not contain and are not reverse complementary to the PAM or PFS.

[0171] FIGS. 63A-63C show schematics of exemplary configurations of various regions of the nucleic acid sequence that correspond to or anneal LAMP primers, or guide RNA sequences, or comprise protospacer-adjacent motif (PAM) or protospacer flanking site (PFS), and target nucleic acid sequences for combined LAMP and DETECTR for amplification and detection, respectively. At the right, the schematics also show corresponding fluorescence data using the LAMP amplification and guide RNA sequences to detect the presence of a target nucleic acid sequence, where a fluorescence signal is the output of the DETECTR reaction and indicates presence of the target nucleic acid.

[0172] FIG. 63A shows a schematic of an arrangement of various regions of the nucleic acid sequence that correspond to or anneal LAMP primers and positions of three guide RNAs (gRNA1, gRNA2, and gRNA3) relative to the LAMP primers (at left). gRNA1 overlaps with the B2c region and is, thus, reverse complementary to the B2 region. gRNA2 overlaps with the B1 region and is, thus, reverse complementary to the B1c region. gRNA3 partially overlaps with the B3 region and partially overlaps with the B2 region and is, thus, partially reverse complementary to the B3c region and partially reverse complementary to the B2c region. The complementary regions (B1, B2c, B3c, F1, F2c, and F3c) are not depicted, but correspond to the regions shown in FIG. 40. At right is a graph of fluorescence from the DETECTR reaction in the presence of 10,000 genome copies of the target nucleic acid or 0 genome copies of the target nucleic acid.

[0173] FIG. 63B shows a schematic of an arrangement of various regions of nucleic acid sequence that correspond to or anneal LAMP primers and positions of three guide RNAs (gRNA1, gRNA2, and gRNA3) relative to the LAMP primers (at left). gRNA1 overlaps with the B1c region and is, thus, reverse complementary to the B1 region. gRNA2 overlaps with the LF region and is, thus, reverse complementary to the LFc region. gRNA 3 partially overlaps with the B2 region and partially overlaps with the LBc region and is, thus, partially reverse complementary to the B2c region and is partially reverse complementary to the LB region. At right is a graph of fluorescence from the DETECTR reaction in the presence of 10,000 genome copies of the target nucleic acid or 0 genome copies of the target nucleic acid.

[0174] FIG. 63C shows a schematic of an arrangement of various regions of the nucleic acid sequence that correspond to or anneal LAMP primers and positions of three guide RNAs (gRNA1, gRNA2, and gRNA3) relative to the LAMP primers (at left). gRNA1 overlaps with the B1c region and is, thus, reverse complementary to the B1 region. gRNA2 partially overlaps with the LF region and partially overlaps with the F2c region and is, thus, partially reverse complementary to the LFc region and partially reverse complementary to the F2 region. gRNA3 overlaps with the B2 and is, thus, reverse complementary to the B2c region. At right is a graph of fluorescence from the DETECTR reaction in the presence of 10,000 genome copies of the target nucleic acid or 0 genome copies of the target nucleic acid.

[0175] FIG. 64A shows a detailed breakdown of the arrangement and sequences of various regions of the nucleic acid sequence that correspond to or anneal LAMP primers or guide RNA sequences, or comprise protospacer-adjacent motif (PAM) or protospacer flanking site (PFS), and target nucleic acid sequences for the LAMP and DETECTR assays shown in FIG. 63A. FIG. 64A discloses SEQ ID NO: 393.

[0176] FIG. 64B shows a detailed breakdown of the arrangement and sequences of various regions of the nucleic acid sequence that correspond to or anneal LAMP primers or guide RNA sequences, or comprise protospacer-adjacent motif (PAM) or protospacer flanking site (PFS), and target nucleic acid sequences for the LAMP and DETECTR assays shown in FIG. 63B. FIG. 64B discloses SEQ ID NO: 393.

[0177] FIG. 64C shows a detailed breakdown of the arrangement and sequences of various regions of the nucleic acid sequence that correspond to or anneal LAMP primers or guide RNA sequences, or comprise protospacer-adjacent motif (PAM) or protospacer flanking site (PFS), and target nucleic acid sequences for the LAMP and DETECTR assays shown in FIG. 63C. FIG. 64C discloses SEQ ID NO: 393.

[0178] FIG. 65 shows the time to result of a reverse-transcription LAMP (RT-LAMP) reaction detected using a DNA binding dye.

[0179] FIG. 66 shows fluorescence signal from a DETECTR reaction following a five-minute incubation with products from RT-LAMP reactions. LAMP primer sets #1-6 in FIG. 65 were designed for use with guide RNA #2 (SEQ ID NO: 250), and LAMP primer sets #7-10 were designed for use with guide RNA #1 (SEQ ID NO: 249).

[0180] FIG. 67 shows detection of sequences from influenza A virus (IAV) using SYTO 9 (a DNA binding dye) following RT-LAMP amplification with LAMP primer sets 1, 2, 4, 5, 6, 7, 8, 9, 10, or a negative control.

[0181] FIG. 68 shows the time to amplification of an influenza B virus (IBV) target sequence following RT-LAMP amplification. Amplification was detected using SYTO 9 in the presence of increasing concentrations of target sequence (0, 100, 1000, 10,000, or 100,000 genome copies of the target sequence per reaction).

[0182] FIG. 69 shows the time to amplification of an IAV target sequence following LAMP amplification with different primer sets.

[0183] FIG. 70 shows detection of target nucleic acid sequences from influenza A virus (IAV) using DETECTR following RT-LAMP amplification with LAMP primer sets 1, 2, 4, 5, 6, 7, 8, 9, 10, or a negative control. Ten reactions were performed per primer set. DETECTR signal was measured as a function of an amount of target sequence present in the reaction.

[0184] FIG. 71 shows a scheme for designing primers for LAMP amplification of a target nucleic acid sequence and detection of a single nucleotide polymorphism (SNP) in the target nucleic acid sequence. In an exemplary arrangement, the SNP of the target nucleic acid is positioned between the F1c region and the B1 region.

[0185] FIGS. 72A-72C show schematics of exemplary arrangements of LAMP primers, guide RNA sequences, protospacer-adjacent motif (PAM) or protospacer flanking site (PFS), and target nucleic acids with a SNP for methods of LAMP amplification of a target nucleic acid and detection of the target nucleic acid using DETECTR.

[0186] FIG. 72A shows a schematic of an exemplary arrangement of the guide RNA with respect to various regions of the nucleic acid sequence that correspond to or anneal LAMP primers. In this arrangement, the PAM or PFS of the target nucleic acid is positioned between an F1c region and a B1 region. The entirety of the guide RNA sequence may be between the F1c region and the B1c region. The SNP is shown as positioned within a sequence of the target nucleic acid that hybridizes to the guide RNA.

[0187] FIG. 72B shows a schematic of an exemplary arrangement of the guide RNA sequence with respect to various regions of the nucleic acid sequence that correspond to or anneal LAMP primers. In this arrangement, the PAM or PFS of the target nucleic acid is positioned between an F1c region and a B1 region and the target nucleic acid comprises a sequence between an F1c region and a B1 region that is reverse complementary to at least 60% of a guide nucleic acid. In this example, the guide RNA is not reverse complementary to the forward inner primer or the backward inner primer. The SNP is shown as positioned within a sequence of the target nucleic acid that hybridizes to the guide RNA.

[0188] FIG. 72C shows a schematic of an exemplary arrangement of the guide RNA sequence with respect to various regions of the nucleic acid sequence that correspond to or anneal LAMP primers. In this arrangement, the PAM or PFS of the target nucleic acid is positioned between the F1c region and the B1 region and the entirety of the guide RNA sequence is between the F1c region and the B1 region. The SNP is shown as positioned within a sequence of the target nucleic acid that hybridizes to the guide RNA.

[0189] FIG. 73 shows an exemplary sequence (SEQ ID NO: 394) of a nucleic acid comprising two PAM sites and a HERC2 SNP.

[0190] FIG. 74 shows results from DETECTR reactions to detect a HERC2 SNP at position 9 with respect to a first PAM site or position 14 with respect to a second PAM site following LAMP amplification. Fluorescence signal, indicative of detection of the target sequence, was measured over time in the presence of a target sequence comprising either a G allele or an A allele in HERC2. The target sequence was detected using a guide RNA (crRNA only) to detect either the A allele or the G allele.

[0191] FIG. 75 shows a heatmap of fluorescence from a DETECTR reaction following LAMP amplification of the target nucleic acid sequence. The DETECTR reaction differentiated between two HERC2 alleles, using guide RNAs (crRNA only) specific for the A allele (SEQ ID NO: 255, “R570 A SNP”) or the G SNP allele (SEQ ID NO: 256, “R571 G SNP”). Positive detection is indicated by a high fluorescence value in the DETECTR reaction.

[0192] FIG. 76 shows combined LAMP amplification of a target nucleic acid by LAMP and detection of the target nucleic acid by DETECTR. Detection was carried out visually with DETECTR by illuminating the samples with a red LED. Each reaction contained a target nucleic acid sequence comprising a SNP allele for either a blue eye phenotype (“Blue Eye”) or a brown eye phenotype (“Brown Eye”). Samples “Brown *” and “Blue *” were an A allele positive control and a G allele positive control, respectively. A guide RNA for either the brown eye phenotype (“Br”) or the blue eye phenotype (“Bl”) was used for each LAMP DETECTR reaction.

[0193] FIG. 77 illustrates schematically the steps of preparing and detecting the presence or absence of SARS-CoV-2 (“2019-nCoV”) in a sample using reverse transcription and loop-mediated isothermal amplification (RT-LAMP) and Cas12 illustrates schematically the steps of preparing and detecting the presence or absence of SARS-CoV-2 (“2019-nCoVreactions.

[0194] FIG. 78 shows the DETECTR assay results of the SARS-CoV-2 N-gene amplified with different primer sets (“2019-nCoV-set1” through “2019-nCoV-set12”) and detected using LbCas12a and a gRNA directed to the N-gene of SARS-CoV-2. A lower time to result is indicative of a positive result. For all primer sets, the time to result was lower for samples with more of the target sequence, indicating that the assay was sensitive for the target sequence.

[0195] FIG. 79 shows the individual traces of the DETECTR reactions plotted in FIG. 78 for the 0 fM and 5 fM samples. In each plot, the 0 fM trace is not visible above the baseline, indicating that there little to no non-specific detection.

[0196] FIG. 80 shows the time to result of a DETECTR reaction on samples containing either the N-gene, the E-gene, or no target (“NTC”) and amplified using primer sets directed to the E-gene of SARS-CoV-2 (“2019-nCoV-E-set13” through “2019-nCoV-E-set20”) or to the N-gene of SARS-CoV-2 (“2019-nCoV-N-set21” through “2019-nCoV-N-set24”). The best performing primer set for specific detection of the SARS-CoV-2 E-gene was SARS-CoV-2-E-set14.

[0197] FIG. 81 shows the DETECTR assay results of the SARS-CoV-2 N-gene amplified with primer set 1 (“2019-nCoV-set1”) and detected using LbCas12a and either a gRNA directed to the N-gene of SARS-CoV-2 (“R1763—CDC-N2-Wuhan”) or a gRNA directed to the N-gene of SARS-CoV (“R1766—CDC-N2-SARS”).

[0198] FIG. 82 shows the results of a DETECTR reaction to determine the limit of detection of SARS-CoV-2 in a DETECTR reaction amplified using a primer set directed to the N-gene of SARS-CoV-2 (“2019-nCoV-N-set1”). Samples containing either 15,000, 4,000, 1,000, 500, 200, 100, 50, 20, or 0 copies of a SARS-CoV-2 N-gene target nucleic acid were detected. A gel of the N-gene RNA is shown below.

[0199] FIG. 83 shows the amplification of RNase P using a POP7 sample primer set. Samples were amplified using LAMP. DETECTR reactions were performed using a gRNA directed to RNase P (“R779”) and a Cas12 variant (SEQ ID NO: 37). Samples contained either HeLa total RNA or HeLa genomic DNA.

[0200] FIG. 84 shows the time to result of a multiplexed DETECTR reaction. Samples contained either in vitro transcribed N-gene of SARS-CoV-2 (“N-gene IVT”), in vitro transcribed E-gene of SARS-CoV-2 (“E-gene IVT”), HeLa total RNA, or no target (“NTC”). Samples were amplified using one or more primer sets directed to the SARS-CoV-2 N-gene (“set1”), the SARS-CoV-2 E-gene (“set14”), or RNase” (“RNaseP”).

[0201] FIG. 85 shows the time to results of a multiplexed DETECTR reaction with different combinations of primer sets directed to either SARS-CoV-2 N-gene (“set1”), SARS-CoV-2 E-gene (“set14”), or RNase P (“RNaseP”). Samples containing in vitro transcribed N-gene of SARS-CoV-2 (left, “N-gene IVT”) or in vitro transcribed E-gene of SARS-CoV-2 (right, “E-gene IVT”) were tested.

[0202] FIG. 86 shows the time to result of a multiplexed DETECTR reaction with the best performing primer set combinations from FIG. 84 and FIG. 85.

[0203] FIG. 87A schematically illustrates the sequence of the CDC-N2 target site used for detecting the N-2 gene of SARS-CoV-2. FIG. 87A discloses SEQ ID NOS 395-398, respectively, in order of appearance.

[0204] FIG. 87B schematically illustrates the sequence of a region of the SARS-CoV-2 N-gene (“N-Sarbeco”) target site. FIG. 87B discloses SEQ ID NOS 399-400 and 400-401, respectively, in order of appearance.

[0205] FIG. 88 shows the results of a DETECTR assay to determine the sensitivity of gRNAs directed to either N-gene of SARS-CoV-2 (“R1763”), the N-gene of SARS-CoV (“R1766”), or the N-gene of a Sarbeco coronavirus (“R1767”) for samples containing either the N-gene of SARS-CoV-2(“N-2019-nCoV”), the N-gene of SARS-CoV (“N-SARS-CoV”), or the N-gene of bat-SL-CoV45 (“N-bat-SL-CoV45”).

[0206] FIG. 89 schematically illustrates the sequence of a region of the SARS-CoV-2 E-gene (“E-Sarbeco”) target site. FIG. 89 discloses SEQ ID NOS 402-403 and 403-404, respectively, in order of appearance.

[0207] FIG. 90 shows the results of a DETECTR assay to determine the sensitivity of two gRNAs directed to a coronavirus N-gene for samples containing either the E-gene of SARS-CoV-2 (“E-2019-nCoV”), the E-gene of SARS-CoV (“E-SARS-CoV”), the E-gene of bat-SL-CoV45 (“E-bat-SL-CoV45”), or the E-gene of bat-SL-CoV21 (“E-bat-SL-CoV21”).

[0208] FIG. 91 shows the results of a lateral flow DETECTR reaction to detect the presence or absence of a SARS-CoV-2 N-gene target RNA using a Cas12 variant (SEQ ID NO: 37). Lateral flow test strips are shown. Samples either containing (“+”) or lacking (“−”) in vitro transcribed SARS-CoV-2 N-gene RNA (“N-gene IVT”) were tested. The top set of horizontal lines (denoted “test”) indicated the results of the DETECTR reaction.

[0209] FIG. 92 illustrates schematically the detection of a target nucleic acid using a programmable nuclease. Briefly, a Cas protein with trans collateral cleavage activity is activated upon binding to a guide nucleic acid and a target sequence reverse complementary to a region of the guide nucleic acid. The activated programmable nuclease cleaves a reporter nucleic acid, thereby producing a detectable signal.

[0210] FIG. 93 illustrates schematically detection of the presence or absence of a target nucleic acid in a sample. Select nucleic acids in a sample are amplified using isothermal amplification. The amplified sample is contacted to a programmable nuclease, a guide nucleic acid, and a reporter nucleic acid, as illustrated in FIG. 17. If the sample contains the target nucleic acid, a detectable signal is produced.

[0211] FIG. 94 shows the results of a DETECTR lateral flow reaction to detect the presence or absence of SARS-CoV-2 (“2019-nCoV”) RNA in a sample. Detection of RNase P is used as a sample quality control. Samples were in vitro transcribed and amplified (left) and detected using a Cas12 programmable nuclease (right). Samples containing (“+”) or lacking (“−”) in vitro transcribed SARS-CoV-2 RNA (“2019-nCoV IVT”) were assayed with a Cas12 programmable nuclease and gRNA directed to SARS-CoV-2 for either 0 min or 5 min. The reaction was sensitive for samples containing SARS-CoV-2.

[0212] FIG. 95 shows the results of a DETECTR reaction using an LbCas12a programmable nuclease (SEQ ID NO: 27) to determine the presence or absence of SARS-CoV-2 in patient samples.

[0213] FIG. 96 shows the results of a lateral flow DETECTR reaction to detect the presence or absence of SARS-CoV-2 in patient samples. Samples were detected with either a gRNA directed to SARS-CoV-2 or a gRNA directed to RNase P.

[0214] FIG. 97 shows technical specifications and assay conditions for detection of coronavirus using reverse transcription and loop-mediated isothermal amplification (RT-LAMP) and Cas12 detection.

[0215] FIG. 98 shows the results of a DETECTR assay evaluating multiple gRNAs for detecting SARS-CoV-2 using LbCas12a. Target nucleic acid sequences were amplified using primer sets to amplify the SARS-CoV-2 E-gene (“2019-nCoV-E-set13” through “2019-nCoV-E-set20” or the SARS-CoV-2 N-gene (“2019-nCoV-N-set21” through “2019-nCoV-N-set24”).

[0216] FIG. 99 shows the results of a DETECTR assay evaluating multiple gRNAs for their utility in distinguishing between three different strains of coronavirus, SARS-CoV-2 (“COVID-2019”), SARS-CoV, or bat-SL-CoV45. Samples containing N-gene amplicons of either SARS-CoV-2 (“N-2019-nCoV”), SARS-CoV (“N-SARS-CoV”), or bat-SL-CoV45 (“N-bat-SL-CoV45”) were tested.

[0217] FIG. 100 shows the results of a DETECTR assay evaluating multiple gRNAs for their utility in distinguishing between three different strains of coronavirus, SARS-CoV-2 (“COVID-2019”), SARS-CoV, or bat-SL-CoV45. Samples containing E-gene amplicons of either SARS-CoV-2 (“N-2019-nCoV”), SARS-CoV (“N-SARS-CoV”), or bat-SL-CoV45 (“N-bat-SL-CoV45”) were tested.

[0218] FIG. 101 shows the results of a DETECTR assay evaluating LAMP primer sets for their utility in multiplexed amplification of SARS-CoV-2 targets. Samples were amplified with one or more primer sets directed to the SARS-CoV-2 N-gene (“set1”) or the SARS-CoV-2 E-gene (“set14”), or RNase P (“RNaseP”).

[0219] FIG. 102 shows the results of a DETECTR assay evaluating the sensitivity of an RT-LAMP amplification reaction to common sample buffers. Reactions were measured in universal transport medium (UTM, top) or DNA/RNA Shield buffer (bottom) at different buffer dilutions (from left to right: 1×, 0.5×, 0.25×, 0.125×, or no buffer).

[0220] FIG. 103 shows the results of a DETECTR assay to determine the limit of detection (LoD) of the DETECTR assay for SARS-CoV-2 (the virus attributed to the COVID-19 infection).

[0221] FIG. 104 shows the results of a DETECTR assay evaluating the target specificity of a gRNA directed to the N-gene of SARS-CoV-2 (“R1763-N-gene”) in a 2-plex multiplexed RT-LAMP reaction using an LbCas12a programmable nuclease (SEQ ID NO: 27).

[0222] FIG. 105 shows the results of a DETECTR assay evaluating the target specificity of a gRNA directed to the N-gene of SARS-CoV-2 (“R1763-N-gene”) or the E-gene of SARS-CoV-2 (“R1765-E-gene”) in a 3-plex multiplexed RT-LAMP reaction using an LbCas12a programmable nuclease (SEQ ID NO: 27).

[0223] FIG. 106 illustrates the design of detector nucleic acids compatible with a PCRD lateral flow device. Exemplary compatible detector nucleic acids, rep072, rep076, and rep100, are provided (left). These detector nucleic acids may be used in a PCRD lateral flow device (right) to detect the presence or absence of a target nucleic acid. The top right schematic illustrates an exemplary band configuration produced when contacted to a sample that does not contain a target nucleic acid. The bottom right schematic shows an exemplary band configuration produced when contacted to a sample that does contain a target nucleic acid. FIG. 106 discloses SEQ ID NOS 372 and 372, respectively, in order of appearance.

[0224] FIG. 107A illustrates a genome map indicating the locations of the E (envelope) gene and the N (nucleoprotein) gene regions within a coronavirus genome. Corresponding regions or annealing regions of primers and probes relative to the E and N gene regions are shown below the respective gene regions. RT-LAMP primers are indicated by black rectangles, the binding position of the F1c and B1c half of the FIP primer (grey) is represented by a striped rectangle with dashed borders. Regions amplified in tests utilized by the World Health Organization (WHO) and the Center for Disease Control (CDC) are denoted as “WHO E amplicon” and “CDC N2 amplicon,” respectively.

[0225] FIG. 107B shows the results of a DETECTR assay evaluating the specificity or broad detection utility of gRNAs directed to the N-gene or E-gene of various coronavirus strains (SARS-CoV-2, SARS-CoV, or bat-SL-CoVZC45) using an LbCas12a programmable nuclease (SEQ ID NO: 27). The N gene gRNA used in the assay (left, “N-gene”) was specific for SARS-CoV-2, whereas the E gene gRNA was able to detect 3 SARS-like coronavirus (right, “E-gene”). A separate N gene gRNA targeting SARS-CoV and a bat coronavirus failed to detect SARS-CoV-2 (middle, “N-gene related species variant”).

[0226] FIG. 107C shows exemplary laboratory equipment utilized in the coronavirus DETECTR assays. In addition to appropriate biosafety protective equipment, the equipment utilized includes a sample collection device, microcentrifuge tubes, heat blocks set to 37° C. and 62° C., pipettes and tips, and lateral flow strips.

[0227] FIG. 107D illustrates an exemplary workflow of a DETECTR assay for the detection of a coronavirus in a subject. Conventional RNA extraction or sample matrix can be used as an input to DETECTR (LAMP pre-amplification and Cas12-based detection for NE gene, EN gene and RNase P), which is visualized by a fluorescent reader or lateral flow strip.

[0228] FIG. 107E shows lateral flow test strips (left) indicating a positive test result for SARS-CoV-2 N-gene (left, top) and a negative test result for SARS-CoV-2 N-gene (left, bottom). The table (right) illustrates possible test indicators and associated results for a lateral flow strip-based coronavirus diagnostic assay that tests for the presences of absence of the RNase P (positive control), SARS-CoV-2 N-gene, and coronavirus E-gene.

[0229] FIG. 108A illustrates cleavage of a detector nucleic acid labeled with FAM and biotin by a Cas12 programmable nuclease in the presence of a target nucleic acid (top). Schematics of lateral flow test strips (bottom) illustrate markings indicative of either the presence (“positive”) or absence (“negative”) of the target nucleic acid in the tested sample. The intact FAM-biotinylated reporter molecule flows to the control capture line. Upon recognition of the matching target, the Cas-gRNA complex cleaves the reporter molecule, which flows to the target capture line.

[0230] FIG. 108B shows the results of a DETECTR assay using LbCas12a to determine the effect of reaction time for a sample containing either 0 fM SARS-CoV-2 RNA or 5 fM SARS-CoV-2 RNA. Fluorescence signal of LbCas12a detection assay on RT-LAMP amplicon for SARS-CoV-2 N-gene saturated within 10 minutes. RT-LAMP amplicon was generated from 2 μLof 5 fM or 0 fM SARS-CoV-2 N-gene IVT RNA by amplifying at 62° C. for 20 minutes.

[0231] FIG. 108C shows lateral flow test strips assaying samples corresponding to the samples assayed by DETECTR in FIG. 108B. Bands corresponding to control (C) or test (T) are shown for samples containing either 0 fM SARS-CoV-2 RNA (“−”) or 5 fM SARS-CoV-2 RNA (“+”) as a function of reaction time. LbCas12a on the same RT-LAMP amplicon produced visible signal through lateral flow assay within 5 minutes.

[0232] FIG. 108D shows the results of a DETECTR assay with LbCas12a (middle) or a CDC protocol (left) to determine the limit of detection of SARS-CoV-2. Signal is shown as a function of the number of copies of viral genome per reaction. Representative lateral flow results for the assay shown for 0 copies/μL and 10 copies/μL (right).

[0233] FIG. 108E shows patient sample DETECTR data. Clinical samples from 6 patients with COVID-19 infection (n=11, 5 replicates) and 12 patients infected with influenza or one of the 4 seasonal coronaviruses (HCoV-229E, HCoV-HKU1, HCoV-NL63, HCoV-OC43) (n=12) were analyzed using SARS-CoV-2 DETECTR (shaded boxes). Signal intensities from lateral flow strips were quantified using ImageJ and normalized to the highest value within the N gene, E gene or RNase P set, with a positive threshold at five standard deviations above background. Final determination of the SARS-CoV-2 test was based on the interpretation matrix in FIG. 107E. FluA denotes Influenza A, and FluB denotes Influenza B. HCoV denotes human coronavirus.

[0234] FIG. 108F shows lateral flow test strips testing for SARS-CoV-2 in a patient with COVID-19 (positive for SARS-CoV-2, “patient 1”), a no target control sample lacking the target nucleic acid (“NTC”), and a positive control sample containing the target nucleic acid (“PC”). All three samples were tested for the presence of the SARS-CoV-2 N-gene, the SARS-CoV-2 E-gene, and RNase P.

[0235] FIG. 108G shows performance characteristics of the SARS-CoV-2 DETECTR assay. 83 clinical samples (41 COVID-19 positive, 42 negative) were evaluated using the fluorescent version of the SARS-CoV-2 DETECTR assay. One sample (COVID19-3) was omitted due to failing assay quality control. Positive and negative calls were based on criteria described in FIG. 32E. fM denotes femtomolar; NTC denotes no-template control; PPA denotes positive predictive agreement; NPA denotes negative predictive agreement.

[0236] FIG. 109 shows a table comparing the SARS-CoV-2 DETECTR assay with RT-LAMP of the present disclosure to the SARS-CoV-2 assay with a quantitative reverse transcription polymerase chain reaction (qRT-PCR) detection method. The N-gene target in the DETECTR RT-LAMP assay is the same as the N-gene N2 amplicon detected in the qRT-PCR assay.

[0237] FIG. 110A shows the time to result of an RT-LAMP amplification under different buffer conditions. Time to results was calculated as the time at which the fluorescent value is one third of the max for the experiment. Reactions that failed to amplify are reported with a value of 20 minutes and labeled as “no amp.” Time to result was determined for different starting concentrations of target control plasmid in either water, 10% phosphate buffered saline (PBS), or 10% universal transport medium (UTM). A lower time to result indicates faster amplification.

[0238] FIG. 110B shows the results of an RT-LAMP assay to determine the amplification efficiency of the N-gene of SARS-CoV-2, the E-gene of SARS-CoV-2, and RNase P in either 5% UTM, 5% PBS, or water. Samples containing 0.5 fM N-gene in vitro transcribed, 0.5 fM of E-gene in vitro transcribed, and 0.8 ng/μL HeLa total RNA (“N+E+total RNA”) or no target controls (“NTC”) were tested.

[0239] FIG. 110C shows amplification of RNA directly from nasal swabs in PBS. Time to result was measured as a function of PBS concentration. Nasal swabs (“nasal swab”) were either spiked with HeLa total RNA (left, “total RNA: 0.08 ng/uL”) or water (right, “total RNA: 0 ng/uL”). Samples without a nasal swab (“no swab”) were compared as controls.

[0240] FIG. 111A shows raw fluorescence curves generated by LbCas12a (SEQ ID NO: 27) detection of SARS-CoV-2 N-gene (n=6). The curves showed saturation in less than 20 minutes.

[0241] FIG. 111B shows the limit of detection of a DETECTR assay for the SARS-CoV-2 N-gene detected with LbCas12a, as determined from the raw fluorescence traces shown in FIG. 111A. Fluorescence intensity was measured with decreasing concentration (copies per mL) of SARS-CoV-2 N-gene.

[0242] FIG. 111C shows the time to result of the limit of detection DETECTR assay, as determined from the raw fluorescence traces shown in FIG. 111A. A lower time to result indicates faster amplification and detection.

[0243] FIG. 112A shows the results of a DETECTR assay using LbCas12a to determine the effect of reaction time for a sample containing either 0 fM SARS-CoV-2 RNA or 5 fM SARS-CoV-2 RNA.

[0244] FIG. 112B shows lateral flow test strips assaying samples corresponding to the samples assayed by DETECTR in FIG. 112A. Bands corresponding to control (C) or test (T) are shown for samples containing either 0 fM SARS-CoV-2 RNA (“−”) or 5 fM SARS-CoV-2 RNA (“+”) as a function of reaction time.

[0245] FIG. 113 shows the results of a DETECTR assay to determine the cross-reactivity of gRNAs for different human coronavirus strains. Samples containing in vitro transcribed RNA of the SARS-CoV-2 N-gene, the SARS-CoV N-gene, the bat-SL-CoVZC45 N-gene, the SARS-CoV-2 E-gene, the SARS-CoV E-gene, or the bat-SL-CoVZC45 E-gene, or clinical samples positive for CoV-HKU1, CoV-299E, CoV-OC43, or CoV-NL63 were tested. HeLa total RNA was tested as a positive control for RNase P, and a sample lacking a target nucleic acid (“NTC”) was tested as a negative control.

[0246] FIG. 114A shows a sequence alignment (SEQ ID NOS: 405-410, respectively, in order of appearance)of the target sites targeted by the N-gene gRNA for three coronavirus strains. The N gene gRNA #1 is compatible with the CDC-N2 amplicon, the N gene gRNA #2 is compatible with WHO N-Sarbeco amplicon.

[0247] FIG. 114B shows a sequence alignment (SEQ ID NOS: 411-416, respectively, in order of appearance) of the target sites targeted by the E-gene gRNA for three coronavirus strains. The two E gene gRNAs tested (E gene gRNA #1 and E gene gRNA #2) are compatible with the WHO E-Sarbeco amplicon.

[0248] FIG. 115A-FIG. 115C show DETECTR kinetic curves on COVID-19 infected patient samples. Ten nasal swab samples from 5 patients (COVID19-1 to COVID19-10) were tested for SARS-CoV-2 using two different genes, N2 and E as well as a sample input control, RNase P. FIG. 115A shows using the standard amplification and detection conditions, 9 of the 10 patients resulted in robust fluorescence curves indicating presence of the SARS-CoV-2 E-gene (20 minute amplification, signal within 10 minutes). FIG. 115B shows the SARS-CoV-2 N-gene required extended amplification time to produce strong fluorescence curves (30 minute amplification, signal within 10 minutes) for 8 of the 10 patients. FIG. 115C shows that as a sample input control, RNase P was positive for 17 of the 22 total samples tested (20 minute amplification, signal within 10 minutes).

[0249] FIG. 116 shows DETECTR analysis of SARS-CoV-2 identifies down to 10 viral genomes in approximately 30 min (20 min amplification, 10 min DETECTR). Duplicate LAMP reactions were amplified for twenty min followed by LbCas12a DETECTR analysis.

[0250] FIG. 117 shows the raw fluorescence at 5 minutes for the LbCas12a DETECTR analysis provided in FIG. 116. The limit of detection of the SARS-CoV-2 N-gene was determined to be 10 viral genomes per reaction (n=6).

[0251] FIG. 118 shows lateral flow DETECTR results on 10 COVID-19 infected patient samples and 12 patient samples for other viral respiratory infections. Ten samples from 6 patients (COVID19-1 to COVID19-5) with one nasopharyngeal swab (A) and one oropharyngeal swab (B) were tested for SARS-CoV-2 using two different genes, N2 and E as well as a sample input control, RNase P. Results were analyzed in accordance with the guidance provided in FIG. 119.

[0252] FIG. 119 shows instructions for the interpretation of SARS-CoV-2 DETECTR lateral flow results.

[0253] FIG. 120A-C show fluorescent DETECTR kinetic curves performed on 11 COVID-19 infected patient samples and 12 patient samples for other viral respiratory infections. Ten nasopharyngeal/oropharyngeal swab samples from 6 patients (COVID19-1 to COVID19-6) were tested for SARS-CoV-2 using two different genes, N2 and E as well as a sample input control, RNase P.

[0254] FIG. 120A shows samples tested using the standard amplification and detection conditions, 10 of the 12 COVID-19 positive patient samples resulted in robust fluorescence curves indicating presence of the SARS-CoV-2 E gene (20-minute amplification, signal within 10 min). No E gene signal was detected in the 12 other viral respiratory clinical samples.

[0255] FIG. 120B shows samples tested for the presence of the SARS-CoV-2 N gene using an extended amplification time to produce strong fluorescence curves (30-minute amplification, signal within 10 min) for 10 of the 12 COVID-19 positive patient samples. No N gene signal was detected in the 12 other viral respiratory clinical samples.

[0256] FIG. 120C shows graphs corresponding to the sample input control, RNase P.

[0257] FIG. 121 shows heatmaps of SARS-CoV-2 DETECTR assay results for clinical samples with the test interpretation indicated. Results of lateral flow SARS-CoV-2 DETECTR assay (top) quantified by ImageJ Gel Analyzer tools for SARS-CoV-2 DETECTR on 24 clinical samples (12 COVID-19 positive) show 98.6% (71/72 strips) agreement with the results of the fluorescent version of the assay (bottom). Both assays were run with 30-minute amplification, Cas12 reaction signal taken at 10 min. Presumptive positive indicated by (+) in orange (bottom, column 4).

[0258] FIG. 122 shows heatmaps of SARS-CoV-2 DETECTR assay results for clinical samples with the test interpretation indicated. The top plot shows result of fluorescent SARS-CoV-2 DETECTR assay on an additional 30 COVID-19 positive clinical samples (27 positive, 1 presumptive positive, 2 negative). Presumptive positive indicated by (+) in orange (top, column 9). The bottom plot shows result of fluorescent SARS-CoV-2 DETECTR assay on an additional 30 COVID-19 negative clinical samples (0 positive, 30 negative).

[0259] FIG. 123 shows the time to result for RT-LAMP amplification of RNase P POP7 with different primer sets. Time to result was determined for samples amplified with primer sets 1-10. Primer set 1 corresponds to SEQ ID NO: 360-SEQ ID NO: 365, and primer set 9 corresponds to SEQ ID NO: 366-SEQ ID NO: 371.

[0260] FIG. 124 shows raw fluorescence over time of a DETECTR reaction performed on RNase P POP7 amplified using RT-LAMP with primer set 1 or primer set 9 and detected with R779, R780, or R1965 gRNAs. The DETECTR reaction was carried out at 37° C. for 90 minutes. The amplicon generated by the set 1 primers were detected without background (dotted line) by R779.

[0261] FIG. 125A shows the time to result of RNase P POP7 detection in samples containing 10-fold dilutions of total RNA amplified using RT-LAMP with primer set 1 or primer set 9. Amplification was carried out at 60° C. for 30 minutes.

[0262] FIG. 125B shows a DETECTR reaction of the RNase P POP7 amplicons shown in FIG. 125A and detected using gRNA 779 (SEQ ID NO: 330) or gRNA 1965 (SEQ ID NO: 331). Samples amplified using primer set 1 were detected with gRNA 779 and samples amplified with primer set 9 were detected with gRNA 1965. The DETECTR reaction was carried out at 37° C. for 90 minutes.

[0263] FIG. 126A and FIG. 126B show photos of cartridges designed for use in a DETECTR assay.

[0264] FIG. 127A and FIG. 127B schematic view of the cartridge pictured in FIG. 126A.

[0265] FIG. 128A-FIG. 128D show schematics of cartridges designed for use in a DETECTR assay. FIG. 128A shows a cartridge with circular reagent storage wells and a z-direction high resistance serpentine path. FIG. 128B shows a cartridge with elongated reagent storage wells and a z-direction high resistance serpentine path. FIG. 128C shows a cartridge with circular reagent storage wells and an xy-direction high resistance serpentine path. FIG. 128D shows a cartridge with elongated reagent storage wells and an xy-direction high resistance serpentine path.

[0266] FIG. 129A-FIG. 129D show schematics of cartridges designed for use in a DETECTR assay. FIG. 129A shows a cartridge with serpentine resistance channels for sample metering which are serpentine on a different plane or layer than the sample metering channel. FIG. 129B shows a cartridge with serpentine resistance channels for sample metering which are serpentine on the same plane or layer than the sample metering channel. FIG. 129C shows a cartridge with right angle arduous path resistance paths for sample metering and a DETECTR sample metering inlet on a different plane or layer than the sample metering channel. FIG. 129D shows a cartridge with right angle arduous path resistance paths for sample metering and a DETECTR sample metering inlet on the same plane or layer than the sample metering channel.

[0267] FIG. 130A shows features of a cartridge designed for use in a DETECTR assay.

[0268] FIG. 130B shows a manufacturing scheme (left and middle) for manufacturing a cartridge of the present disclosure and a readout device (right) for detecting a sample in a cartridge.

[0269] FIG. 131A shows a schematic of a cartridge manifold for heating regions of a cartridge of the present disclosure. The cartridge manifold has an integrated heating zone with integrated air supply connections and integrated O-ring grooves for air supply interface. The cartridge manifold contains an insulation zone to thermally separate the amplification temperature zone from the detection temperature zone and to maintain the appropriate temperature of the amplification chambers and the detection chambers of the cartridge.

[0270] FIG. 131B shows two production methods for producing the cartridges described herein. In a first manufacturing method (left), a cartridge is manufactured using two-dimensional (2D) lamination of multiple layers. In a second manufacturing method (right), a part containing consolidated, complex features is injection molded and sealed by lamination.

[0271] FIG. 131C shows a schematic of a cartridge with a luer slip adapter for coupling the cartridge to a syringe. The adapter can form a tight fit seal with a slip luer tip. The adapter is configured to function with any of the cartridges disclosed herein.

[0272] FIG. 132A and FIG. 132B show schematics of an integrated flow cell for use with a microfluidic cartridge. The integrated flow cell contains three regions, a lysis region, an amplification region, and a detection region. The lysis region is long enough to accommodate a microfluidic chip shop sample lysis flow cell. The lysis flow cell may be combined with the amplification and detection chambers on the cartridges disclosed herein.

[0273] FIG. 133 shows details of the inlet channels on a cartridge of the present disclosure.

[0274] FIG. 134 shows a workflow for performing a DETECTR assay using a microfluidic cartridge of the present disclosure. The cartridge (“chip”) is loaded with a sample and reaction solutions. The amplification chamber (“LAMP chamber”) is heated to 60° C. and the sample is incubated in the amplification chamber for 30 minutes. The amplified sample (“LAMP amplicon”) is pumped to the DETECTR reaction chambers, and the DETECTR reagents are pumped to the DETECTR reaction chambers. The DETECTR reaction chambers are heated to 37° C. and the sample is incubated for 30 minutes. The fluorescence in the DETECTR reaction chambers is measured in real time to produce a quantitative result.

[0275] FIG. 135 shows a schematic of a system electronics architecture of a cartridge manifold compatible with the cartridges disclosed herein. The electronics are configured to heat a first zone of a cartridge to 37° C. and a second zone of the cartridge to 60° C.

[0276] FIG. 136A and FIG. 136B show schematics of a cartridge manifold for heating and detecting a cartridge of the present disclosure. The manifold is configured to accept a cartridge, facilitate a DETECTR reaction, and read the resulting fluorescence of the DETECTR reaction.

[0277] FIG. 137A shows an example of a fluorescent sample in a cartridge and illuminated with a cartridge manifold. The positive control well contains reagents and an amplified sample following a 30 minute amplification step at 60° C. and a 30 minute detection step at 37° C. The empty well serves as a pseudo negative sample.

[0278] FIG. 137B shows a cartridge manifold for heating and detecting a cartridge of the present disclosure.

[0279] FIG. 137C shows a cartridge manifold for heating and detecting a cartridge of the present disclosure.

[0280] FIG. 138A and FIG. 138B show fluorescence produced in detection chambers of microfluidic cartridges facilitated by manifolds of the present disclosure.

[0281] FIG. 139A, FIG. 139B, FIG. 140A, and FIG. 140B show thermal testing summaries for an amplification chamber heated to 60° C. (FIG. 139A and FIG. 140A) or a DETECTR chamber heated to 37° C. (FIG. 139B and FIG. 140B).

[0282] FIG. 141A shows the DETECTR results run on a plate reader at a gain of 100, using the LAMP product from the microfluidic cartridge as an input. The samples were run in duplicate with a single non-template control (NTC).

[0283] FIG. 141B shows three LAMP products run on a plate reader using samples from a microfluidic chip. The LAMP reactions are numbered in the order that the chips were run (LAMP_1 was run first, etc.). The donor was homozygous for SNP A, and in accordance with that crRNA 570 comes up first. The ATTO 488 was used as a fluorescence standard.

[0284] FIG. 142A shows an image of a loaded microfluidic chip.

[0285] FIG. 142B shows results of a DETECTR reaction measured on a plate reader after 30 minutes of LAMP amplification.

[0286] FIG. 143A, FIG. 143B, FIG. 143C, and FIG. 143D show results of the coronavirus DETECTR reaction. The two reaction chambers with 10 copies input to LAMP resulted in a rapidly increasing DETECTR signal. All NTCs were negative. With 10 copies input into LAMP, the DETECTR signal gradually increased over the course of the reaction, as shown in the photodiode measurements below in FIG. 143C. The negative controls in FIG. 143D indicated an absence of contamination.

[0287] FIG. 144A, FIG. 144B, FIG. 144C, and FIG. 144D show the results of the repeated coronavirus DETECTR reaction.

[0288] FIG. 145A, FIG. 145B, FIG. 146A, FIG. 146B, and FIG. 146C show the photodiode measurements for an influenza B DETECTR reaction in a microfluidic cartridge.

[0289] FIG. 147 shows fluorescence results from a series of DETECTR reagents which had been stored in glass capillaries for 7 months.

[0290] FIG. 148 provides a design for a spin-through column and a method for using the spin-through column for sequential amplification and DETECTR reactions.

[0291] FIG. 149 provides structures for three reagents used to construct electrochemically detectable nucleic acids: (A) ferrocene-tagged thymidine, (B) 6-carboxyfluorescein, and (C) biotin-tagged phosphate.

[0292] FIG. 150 provides a design for an injection molded-cartridge containing a sample input chamber and multiple chambers in which portions of the sample can be subjected to amplification and detector reactions.

[0293] FIG. 151 provides a design for a device comprising a detector diode array and heating panels that is capable of utilizing the injection-molded cartridge shown in FIG. 150.

[0294] FIG. 152 and FIG. 153 show fluorescence data from a series of DETECTR reactions performed on samples subjected to different dual-lysis amplification buffers.

[0295] FIG. 154 panel (a) provides a design for an injection-molded cartridge for performing multiple amplification and DETECTR reactions on a sample. Panel (b) provides a design for a device configured to utilize the injection-molded cartridge and measure fluorescence from the DETECTR reactions performed in the cartridge.

[0296] FIG. 155 provides a method for utilizing the injection-molded cartridge and device shown in FIG. 154 for performing parallel amplification and DETECTR reactions on a sample.

[0297] FIG. 156 shows diode arrays and dye-loaded reaction compartments from the injection-molded cartridge and device in FIG. 154.

[0298] FIG. 157 shows a possible design for an injection molded cartridge comprising one sample chamber connected to 5 amplification chamber, and 2 Detection chambers connected to each amplification chamber. Thus, the device is capable of performing 10 parallel DETECTR reactions on a single sample.

[0299] FIG. 158 shows a possible design for an injection molded cartridge comprising one sample chamber connected to 4 amplification chamber, and 2 Detection chambers connected to each amplification chamber. The inj ection-molded cartridge comprises a series of valves and pumps or ports to pump manifolds that control flow throughout the cartridge.

[0300] FIG. 159 shows a possible design for an injection molded cartridge comprising one sample chamber connected to 4 amplification chamber, 2 Detection chambers connected to each amplification chamber, and a reagent chamber connected to the sample chamber.

[0301] FIG. 160 provides a top-down view of an injected-molded cartridge design with the reagent chambers in the flow paths leading to the amplification and Detection chambers.

[0302] FIG. 161 shows a portion of an injected-molded cartridge design with a sample chamber capable of connecting to multiple reagent and amplification chambers by a single rotating valve.

[0303] FIG. 162 shows a portion of an injected-molded cartridge design with a sliding valve connecting multiple compartments. Panels A-C show different positions that the sliding valve is capable of adopting.

[0304] FIG. 163 panel A shows a possible design for an injection-molded cartridge with a casing. Panel B provides a physical model of the design shown in panel A.

[0305] FIG. 164 panel A provides a bottom-up view a design of an injection-molded cartridge with a casing. Panel B provides a view of the top of the injection-molded cartridge.

[0306] FIG. 165 provides multiple views of an injection-molded cartridge with a sliding valve.

[0307] FIG. 166 provides two views of a portion of an injection-molded cartridge with multiple reagent wells that lead to transparent reaction chambers.

[0308] FIG. 167 panels A-B provide top-down views of an injection-molded cartridge design. Panel C shows a picture of a physical model of the injection-molded cartridge.

[0309] FIG. 168 shows a picture of an injection-molded cartridge housed in a device containing a diode array.

[0310] FIG. 169 shows a graphic user interface for controlling a device that contains an injection-molded cartridge and a diode array for detection.

[0311] FIG. 170 shows results from a series of fluorescence experiments utilizing an 8-diode detector array, an 8 chamber injection-molded cartridge, and dyes.

[0312] FIG. 171 shows fluorescence results from a series of HERC2 targeting DETECTR reactions and buffer controls, measured with an 8-diode detector array.

[0313] FIG. 172 shows an injection molded cartridge inserted into a device, with 8 chambers containing DETECTR reactions.

[0314] FIG. 173 shows the results of amplification of a SeraCare target nucleic acid using LAMP under different lysis conditions. Samples were amplified in a low pH buffer containing either buffer (top plots) or a viral lysis buffer (“VLB,” bottom plots). Buffers contained no reducing agent (“Control,” columns 1 and 4), Reducing Agent B (columns 2 and 5), or Reducing Agent A (columns 3 and 6). Samples were incubated for 5 minutes at either room temperature (left plots) or 95° C. (right plots). Samples containing either no target (“NTC”), 2.5, 25, or 250 copies per reaction. Assays were performed in triplicate using 5 μL of sample in a 25 μL reaction.

[0315] FIG. 174 shows the results of amplification of a SeraCare standard target nucleic acid using LAMP under different lysis conditions. Samples were amplified in a low pH buffer containing either buffer (left plots) or a viral lysis buffer (“VLB,” right plots). Buffers contained no reducing agent (“Control”), Reducing Agent B, or Reducing Agent A. Samples were incubated for 5 minutes at either room temperature (top plots) or 95° C. (bottom plots). Samples containing either no target (“NTC”), 1.5, 2.5, 15, 25, 150, or 250 copies per reaction. Assays were performed in triplicate using 3 μL of sample in a 15 μL reaction or 5 μL of sample in a 25 μL reaction.

[0316] FIG. 175 shows amplification of a SARS-CoV-2 N gene (“N”) and an RNase P sample input control nucleic acid (“RP”) in the presence of six different viral lysis buffers (“VLB,” “VLB-D,” “VLB-T,” “Buffer,” “Buffer-A,” and “Buffer-B”). Buffer-A contains Buffer with Reducing Agent A and Buffer-B contains Buffer with Reducing Agent B. Shaded squares indicate rate of amplification, with darker shading indicating faster amplification. Amplification was performed at either 95° C. (“95C”) or room temperature (“RT”) on high, medium, or low titer COVID-19 positive patient samples (“16.9,” “30.5,” and “33.6,” respectively). Samples were measured in duplicate.

[0317] FIG. 176 shows square wave voltammetry results for a DETECTR reaction performed with electroactive reporter nucleic acids. The results were collected immediately following (0 minutes) and 33 minutes after initiation of the DETECTR reaction.

[0318] FIG. 177 shows cyclic voltammetry results for a DETECTR reaction performed with electroactive reporter nucleic acids. The results were collected immediately following (0 minutes) and 26 minutes after initiation of the DETECTR reaction.

### DETAILED DESCRIPTION

[0319] The present disclosure provides various devices, systems, fluidic devices, and kits for rapid lab tests, which may quickly assess whether a target nucleic acid is present in a sample by using a programmable nuclease that can interact with functionalized surfaces of the fluidic systems to generate a detectable signal. In particular, provided herein are various devices, systems, fluidic devices, and kits for rapid lab tests, which may quickly assess whether a target nucleic acid is present in a biological sample. The target nucleic acid may be from a virus. For example, the devices, systems fluidic devices, and kits for rapid lab tests disclosed herein may assess whether a target nucleic acid from a strain of influenza virus is present in a sample. The influenza can be influenza A or influenza B. The virus may be a coronavirus. The compositions and methods provided herein disclose programmable nucleases that can be used in the systems, fluidic devices, and kits provided herein to detect target nucleic acids from influenza or another virus, for example another respiratory virus (e.g., coronavirus). In some embodiments, the target nucleic acids can be from an upper respiratory tract virus. In some embodiments, provided herein are devices, systems, fluidic devices, and kits that can perform multiplexed detection of more than one unique sequence of target nucleic acids. For example, the devices, systems, fluidic devices, kits, and programmable nucleases provided herein can be used for multiplexed detection of target nucleic acids from one or more than viruses. In particular embodiments, the devices, systems, fluidic devices, kits, and programmable nucleases provided herein can be used for multiplexed detection of influenza A and influenza B. In some embodiments, devices, systems, fluidic devices, kits, and programmable nucleases provided herein can be used for multiplexed detection of influenza A, influenza B, and one or more other viruses (e.g., coronavirus, RSV or another respiratory virus, such as an upper respiratory tract virus).

[0320] The systems and programmable nucleases disclosed herein can be used as a companion diagnostic with any of the diseases disclosed herein (e.g., RSV, sepsis, flu), or can be used in reagent kits, point-of-care diagnostics, or over-the-counter diagnostics. The systems may be used as a point of care diagnostic or as a lab test for detection of a target nucleic acid and, thereby, detection of a condition in a subject from which the sample was taken. The systems may be used to determine the presence or absence of a gene of interest (e.g., a gene associated with a disease state) in a subject from which the sample was taken. The systems may be used to determine the presence or absence of a pathogen (e.g., a virus or bacterium) in a subject from which the sample was taken. The systems may be used in various sites or locations, such as in laboratories, in hospitals, in physician offices/laboratories (POLs), in clinics, at remotes sites, or at home. Sometimes, the present disclosure provides various devices, systems, fluidic devices, and kits for consumer genetic use or for over the counter use.

[0321] Described herein are devices, systems, fluidic devices, kits, and methods for detecting the presence of a target nucleic acid in a sample. A target nucleic acid may be a gene, or a portion of a gene, associated with a disease state. A target nucleic acid may be a nucleic acid from a pathogen (e.g., a virus or a bacterium). The devices, systems, fluidic devices, kits, and methods for detecting the presence of a target nucleic acid in a sample can be used in a rapid lab tests for detection of a target nucleic acid of interest (e.g., target nucleic acids from influenza, coronavirus, or other pathogens, or target nucleic acids corresponding to a gene of interest). In particular, provided herein are devices, systems, fluidic devices, and kits, wherein the rapid lab tests can be performed in a single system. The target nucleic acid may be a portion of a nucleic acid from a virus or a bacterium or other agents responsible for a disease in the sample. The target nucleic acid may be a portion of an RNA or DNA from any organism in the sample. In some embodiments, programmable nucleases disclosed herein are activated to initiate trans cleavage activity of an RNA reporter by RNA or DNA. A programmable nuclease as disclosed herein is, in some cases, binds to a target RNA to initiate trans cleavage of an RNA reporter, and this programmable nuclease can be referred to as an RNA-activated programmable RNA nuclease. In some instances, a programmable nuclease as disclosed herein binds to a target DNA to initiate trans cleavage of an RNA reporter, and this programmable nuclease can be referred to as a DNA-activated programmable RNA nuclease. In some cases, a programmable nuclease as described herein is capable of being activated by a target RNA or a target DNA. For example, a Cas13 protein, such as Cas13a, disclosed herein is activated by a target RNA nucleic acid or a target DNA nucleic acid to transcollaterally cleave RNA reporter molecules. In some embodiments, the Cas13 binds to a target ssDNA which initiates trans cleavage of RNA reporters. The detection of the target nucleic acid in the sample may indicate the presence of the disease in the sample and may provide information for taking action to reduce the transmission of the disease to individuals in the disease-affected environment or near the disease-carrying individual. The detection of the target nucleic acid in the sample may indicate the presence of a disease mutation, such as a single nucleotide polymorphism (SNP) that provide antibiotic resistance to a disease-causing bacteria. The detection of the target nucleic acid is facilitated by a programmable nuclease. The programmable nuclease can become activated after binding of a guide nucleic acid with a target nucleic, in which the activated programmable nuclease can cleave the target nucleic acid and can have trans cleavage activity, which can also be referred to as “collateral” or “transcollateral” cleavage. Trans cleavage activity can be non-specific cleavage of nearby single-stranded nucleic acids by the activated programmable nuclease, such as trans cleavage of detector nucleic acids with a detection moiety. Once the detector nucleic acid is cleaved by the activated programmable nuclease, the detection moiety is released from the detector nucleic acid and generates a detectable signal that is immobilized to on a support medium. Often the detection moiety is at least one of a fluorophore, a dye, a polypeptide, or a nucleic acid. Sometimes the detection moiety binds to a capture molecule on the support medium to be immobilized. The detectable signal can be visualized on the support medium to assess the presence or level of the target nucleic acid associated with an ailment, such as a disease. The programmable nuclease can be a CRISPR-Cas (clustered regularly interspaced short palindromic repeats—CRISPR associated) nucleoprotein complex with trans cleavage activity, which can be activated by binding of a guide nucleic acid with a target nucleic acid.

[0322] In one aspect, described herein, is a system for detecting a target nucleic acid. The system may comprise a support medium; a guide nucleic acid targeting a target sequence; a programmable nuclease capable of being activated when complexed with the guide nucleic acid and the target sequence; and a single stranded detector nucleic acid comprising a detection moiety, wherein the detector nucleic acid is capable of being cleaved by the activated nuclease, thereby generating a first detectable signal.

[0323] In another aspect, described herein is a system for detecting a target nucleic acid, the system comprising a reagent chamber and a support medium for detection of the first detectable signal. The reagent chamber comprises a guide nucleic acid targeting a target sequence; a programmable nuclease capable of being activated when complexed with the guide nucleic acid and the target sequence; and a single stranded detector nucleic acid comprising a detection moiety, wherein the detector nucleic acid is capable of being cleaved by the activated nuclease, thereby generating a first detectable signal.

[0324] Further described herein is a method of detecting a target nucleic acid in a sample comprising contacting the sample with a guide nucleic acid targeting a target sequence, a programmable nuclease capable of being activated when complexed with the guide nucleic acid and the target sequence, a single stranded detector nucleic acid comprising a detection moiety, wherein the detector nucleic acid is capable of being cleaved by the activated nuclease, thereby generating a first detectable signal, and presenting the first detectable signal using a support medium.

[0325] Also described herein are various designs of assays for CRISPR-Cas diagnostics for detecting target nucleic acids (e.g., from influenza, coronavirus, or genes associated with a disease state). The design and format of the lateral flow assays disclosed herein can include new Cas reporter molecules, which can be tethered to the surface of the assay in a reaction chamber that is upstream of the lateral flow strip itself. The assay designs disclosed herein provide significant advantages as they minimize the chances of false positives, and thus can have improved sensitivity and specificity for a target nucleic acid.

[0326] Also described herein is a kit for detecting a target nucleic acid (e.g., from influenza, coronavirus, or genes associated with a disease state). The kit may comprise a support medium; a guide nucleic acid targeting a target sequence; a programmable nuclease capable of being activated when complexed with the guide nucleic acid and the target sequence; and a single stranded detector nucleic acid comprising a detection moiety, wherein the detector nucleic acid is capable of being cleaved by the activated nuclease, thereby generating a first detectable signal.

[0327] A biological sample from an individual or an environmental sample can be tested to determine whether the individual has a communicable disease. The biological sample can be tested to detect the presence or absence of at least one target nucleic acid from virus (e.g., an influenza virus, a coronavirus, or a respiratory syncytial virus). The biological sample can be tested to detect the presence or absence of at least one target nucleic acid from bacterium. The at least one target nucleic acid from a pathogen responsible for the disease that is detected can also indicate that the pathogen is wild-type or comprises a mutation that confers resistance to treatment, such as antibiotic treatment. In some embodiments, a biological sample from an individual or an environmental sample can be tested to determine whether the individual has a gene or gene mutation associated with a disease state. A sample from an individual or from an environment is applied to the reagents described herein. The reaction between the sample and the reagents may be performed in the reagent chamber provided in the kit or on a support medium provided in the kit. If the target nucleic acid is present in the sample, the target nucleic acid binds to the guide nucleic acid to activate the programmable nuclease. The activated programmable nuclease cleaves the detector nucleic acid and generates a detectable signal that can be visualized on the support medium. If the target nucleic acid is absent in the sample or below the threshold of detection, the guide nucleic acid remains unbound, the programmable nuclease remains inactivated, and the detector nucleic acid remains uncleaved. After the sample and the reagents are contacted for a predetermined time, the reacted sample is placed on a sample pad of a support medium. The sample can be placed on to the sample pad by dipping the support medium into the reagent chamber, applying the reacted sample to the sample pad, or allowing the sample to transport if the reagent was initially placed on the support medium. As the reacted sample and reagents move along the support medium to a detection region and after a predetermined amount of time after applying the reacted sample, a positive control marker can be visualized in the detection region. If the sample is positive for the target nucleic acid, a test marker for the detectable signal can also be visualized. The results in the detection region can be visualized by eye or using a mobile device. In some instances, an individual can open a mobile application for reading of the test results on a mobile device having a camera and take an image of the support medium, including the detection region, barcode, reference color scale, and fiduciary markers on the housing, using the camera of the mobile device and the graphic user interface (GUI) of the mobile application. The mobile application can identify the test, visualize the detection region in the image, and analyze to determine the presence or absence or the level of the target nucleic acid responsible for the disease. The mobile application can present the results of the test to the individual, store the test results in the mobile application, or communicate with a remote device and transfer the data of the test results.

[0328] Such devices, systems, fluidic devices, kits, and methods described herein may allow for detection of target nucleic acid, and in turn the viral infection (e.g., influenza viral infection, a coronavirus, or a respiratory syncytial virus), bacterial infection, or disease state associated with the target nucleic acid, in remote regions or low resource settings without specialized equipment. Also, such devices, systems, fluidic devices, kits, and methods described herein may allow for detection of target nucleic acid, and in turn the pathogen and disease associated with the target nucleic acid, in healthcare clinics or doctor offices without specialized equipment. In some cases, this provides a point of care testing for users to easily test for a disease or infection at home or quickly in an office of a healthcare provider. Assays that deliver results in under an hour, for example, in 15 to 60 minutes, are particularly desirable for at home testing for many reasons. Antivirals can be most effective when administered within the first 48 hours and improve antibiotic stewardship. Thus, the systems and assays disclosed herein, which are capable of delivering results in under an hour can will allow for the delivery of anti-viral therapy at an optimal time. Additionally, the systems and assays provided herein, which are capable of delivering quick diagnoses and results, can help keep or send a patient at home, improve comprehensive disease surveillance, and prevent the spread of an infection. In other cases, this provides a test, which can be used in a lab to detect a nucleic acid of interest in a sample from a subject. In particular, provided herein are devices, systems, fluidic devices, and kits, wherein the rapid lab tests can be performed in a single system. In some cases, this may be valuable in detecting diseases in a developing country and as a global healthcare tool to detect the spread of a disease or efficacy of a treatment or provide early detection of a viral infection, such as influenza.

[0329] Some methods as described herein use an editing technique, such as a technique using an editing enzyme or a programmable nuclease and guide nucleic acid, to detect a target nucleic acid. An editing enzyme or a programmable nuclease in the editing technique can be activated by a target nucleic acid, after which the activated editing enzyme or activated programmable nuclease can cleave nearby single-stranded nucleic acids, such detector nucleic acids with a detection moiety. A target nucleic acid (e.g., a target nucleic acid from a virus, such as influenza) can be amplified by isothermal amplification and then an editing technique can be used to detect the marker. In some instances, the editing technique can comprise an editing enzyme or programmable nuclease that, when activated, cleaves nearby RNA or DNA as the readout of the detection. The methods as described herein in some instances comprise obtaining a cell-free DNA sample, amplifying DNA from the sample, using an editing technique to cleave detector nucleic acids, and reading the output of the editing technique. In other instances, the method comprises obtaining a fluid sample from a patient, and without amplifying a nucleic acid of the fluid sample, using an editing technique to cleave detector nucleic acids, and detecting the nucleic acid. The method can also comprise using single-stranded detector DNA, cleaving the single-stranded detector DNA using an activated editing enzyme, wherein the editing enzyme cleaves at least 50% of a population of single-stranded detector DNA as measured by a change in color. A number of samples, guide nucleic acids, programmable nucleases or editing enzymes, support mediums, target nucleic acids, single-stranded detector nucleic acids, and reagents are consistent with the devices, systems, fluidic devices, kits, and methods disclosed herein.

[0330] Also disclosed herein are detector nucleic acids and methods detecting a target nucleic using the detector nucleic acids. Often, the detector nucleic acid is a protein-nucleic acid. For example, a method of assaying for a target nucleic acid in a sample comprises contacting the sample to a complex comprising a guide nucleic acid comprising a segment that is reverse complementary to a segment of the target nucleic acid and a programmable nuclease that exhibits sequence independent cleavage upon forming a complex comprising the segment of the guide nucleic acid binding to the segment of the target nucleic acid; and assaying for a signal indicating cleavage of at least some protein-nucleic acids of a population of protein-nucleic acids, wherein the signal indicates a presence of the target nucleic acid in the sample and wherein absence of the signal indicates an absence of the target nucleic acid in the sample. Often, the protein-nucleic acid is an enzyme-nucleic acid or an enzyme substrate-nucleic acid. Sometimes, the protein-nucleic acid is attached to a solid support. The nucleic acid can be DNA, RNA, or a DNA/RNA hybrid. The methods described herein use a programmable nuclease, such as the CRISPR/Cas system, to detect a target nucleic acid. A method of assaying for a target nucleic acid in a sample, for example, comprises: a) contacting the sample to a complex comprising a guide nucleic acid comprising a segment that is reverse complementary to a segment of the target nucleic acid and a programmable nuclease that exhibits sequence independent cleavage upon forming a complex comprising the segment of the guide nucleic acid binding to the segment of the target nucleic acid; b) contacting the complex to a substrate; c) contacting the substrate to a reagent that differentially reacts with a cleaved substrate; and d) assaying for a signal indicating cleavage of the substrate, wherein the signal indicates a presence of the target nucleic acid in the sample and wherein absence of the signal indicates an absence of the target nucleic acid in the sample. Often, the substrate is an enzyme-nucleic acid. Sometimes, the substrate is an enzyme substrate-nucleic acid.

[0331] Cleavage of the protein-nucleic acid produces a signal. For example, cleavage of the protein-nucleic acid produces a calorimetric signal, a potentiometric signal, an amperometric signal, an optical signal, or a piezo-electric signal. Various devices can be used to detect these different types signals, which indicate whether a target nucleic acid is present in the sample.

### Sample

[0332] A number of samples are consistent with the devices, systems, fluidic devices, kits, and methods disclosed herein. These samples are, for example, consistent with fluidic devices disclosed herein for detection of a target nucleic acid within the sample, wherein the fluidic device may comprise multiple pumps, valves, reservoirs, and chambers for sample preparation, amplification of a target nucleic acid within the sample, mixing with a programmable nuclease, and detection of a detectable signal arising from cleavage of detector nucleic acids by the programmable nuclease within the fluidic system itself. These samples can comprise a target nucleic acid for detection of an ailment, such as a disease, pathogen, or virus, such as influenza. Generally, a sample from an individual or an animal or an environmental sample can be obtained to test for presence of a disease, or any mutation of interest. A biological sample from the individual may be blood, serum, plasma, saliva, urine, mucosal sample, peritoneal sample, cerebrospinal fluid, gastric secretions, nasal secretions, sputum, pharyngeal exudates, urethral or vaginal secretions, an exudate, an effusion, or tissue. A tissue sample may be dissociated or liquefied prior to application to detection system of the present disclosure. Samples can comprise one or more target nucleic acids for detection of an ailment, such as a disease, cancer, or genetic disorder, or genetic information, such as for phenotyping, genotyping, or determining ancestry and are compatible with the reagents and support mediums as described herein. Generally, a sample can be taken from any place where a nucleic acid can be found. Samples can be taken from an individual/human, a non-human animal, or a crop, or an environmental sample can be obtained to test for presence of a disease, virus, pathogen, cancer, genetic disorder, or any mutation or pathogen of interest. A biological sample can be blood, serum, plasma, lung fluid, exhaled breath condensate, saliva, spit, urine, stool, feces, mucus, lymph fluid, peritoneal, cerebrospinal fluid, amniotic fluid, breast milk, gastric secretions, bodily discharges, secretions from ulcers, pus, nasal secretions, sputum, pharyngeal exudates, urethral secretions/mucus, vaginal secretions/mucus, anal secretion/mucus, semen, tears, an exudate, an effusion, tissue fluid, interstitial fluid (e.g., tumor interstitial fluid), cyst fluid, tissue, or, in some instances, a combination thereof. A sample can be an aspirate of a bodily fluid from an animal (e.g. human, animals, livestock, pet, etc.) or plant. A tissue sample can be from any tissue that may be infected or affected by a pathogen (e.g., a wart, lung tissue, skin tissue, and the like). A tissue sample (e.g., from animals, plants, or humans) can be dissociated or liquified prior to application to detection system of the present disclosure. A sample can be from a plant (e.g., a crop, a hydroponically grown crop or plant, and/or house plant). Plant samples can include extracellular fluid, from tissue (e.g., root, leaves, stem, trunk etc.). A sample can be taken from the environment immediately surrounding a plant, such as hydroponic fluid/water, or soil. A sample from an environment may be from soil, air, or water. In some instances, the environmental sample is taken as a swab from a surface of interest or taken directly from the surface of interest. In some instances, the raw sample is applied to the detection system. In some instances, the sample is diluted with a buffer or a fluid or concentrated prior to application to the detection system or be applied neat to the detection system. Sometimes, the sample is contained in no more 20 uL. The sample, in some cases, is contained in no more than 1, 5, 10, 15, 20, 25, 30, 35 40, 45, 50, 55, 60, 65, 70, 75, 80, 90, 100, 200, 300, 400, 500 uL, or any of value from 1 uL to 500 uL. Sometimes, the sample is contained in more than 500 uL.

[0333] In some instances, the sample is taken from single-cell eukaryotic organisms; a plant or a plant cell; an algal cell; a fungal cell; an animal cell, tissue, or organ; a cell, tissue, or organ from an invertebrate animal; a cell, tissue, fluid, or organ from a vertebrate animal such as fish, amphibian, reptile, bird, and mammal; a cell, tissue, fluid, or organ from a mammal such as a human, a non-human primate, an ungulate, a feline, a bovine, an ovine, and a caprine. In some instances, the sample is taken from nematodes, protozoans, helminths, or malarial parasites. In some cases, the sample comprises nucleic acids from a cell lysate from a eukaryotic cell, a mammalian cell, a human cell, a prokaryotic cell, or a plant cell. In some cases, the sample comprises nucleic acids expressed from a cell.

[0334] The sample used for disease testing may comprise at least one target sequence that can bind to a guide nucleic acid of the reagents described herein. In some cases, the target sequence is a portion of a nucleic acid. A portion of a nucleic acid can be from a genomic locus, a transcribed mRNA, or a reverse transcribed cDNA. A portion of a nucleic acid can be from 5 to 100, 5 to 90, 5 to 80, 5 to 70, 5 to 60, 5 to 50, 5 to 40, 5 to 30, 5 to 25, 5 to 20, 5 to 15, or 5 to 10 nucleotides in length. A portion of a nucleic acid can be 5, 6, 7, 8, 9, 10, 11, 12, 13, 14, 15, 16, 17, 18, 19, 20, 21, 22, 23, 24, 25, 26, 27, 28, 29, 30, 31, 32, 33, 34, 35, 36, 37, 38, 39, 40, 45, 50, 60, 70, 80, 90, or 100 nucleotides in length. The target sequence can be reverse complementary to a guide nucleic acid.

[0335] In some cases, the target sequence is a portion of a nucleic acid from a virus or a bacterium or other agents responsible for a disease in the sample. The target sequence, in some cases, is a portion of a nucleic acid from a sexually transmitted infection or a contagious disease, in the sample. The target sequence, in some cases, is a portion of a nucleic acid from an upper respiratory tract infection, a lower respiratory tract infection, or a contagious disease, in the sample. The target sequence, in some cases, is a portion of a nucleic acid from a hospital acquired infection or a contagious disease, in the sample. The target sequence, in some cases, is an ssRNA. These target sequences may be from a disease, and the disease may include but is not limited to influenza virus including influenza A virus (IAV) or influenza B virus (IBV), rhinovirus, cold viruses, a respiratory virus, an upper respiratory virus, a lower respiratory virus, or respiratory syncytial virus. Pathogens include viruses, fungi, helminths, protozoa, and parasites. Pathogenic viruses include but are not limited to influenza virus and the like. Pathogens include, e.g., Mycobacterium tuberculosis, Streptococcus agalactiae, methicillin-resistant Staphylococcus aureus, Legionella pneumophila, Streptococcus pyogenes, Escherichia coli, Neisseria meningitidis, Pneumococcus, Hemophilus influenzae B, influenza virus, respiratory syncytial virus (RSV), M. pneumoniae, Streptococcus intermdius, Streptococcus pneumoniae, and Streptococcus pyogenes. Often the target nucleic acid comprises a sequence from a virus or a bacterium or other agents responsible for a disease that can be found in the sample. Pathogenic viruses include but are not limited to influenza virus; RSV; coronavirus, an ssRNA virus, a respiratory virus, an upper respiratory virus, a lower respiratory virus, or a rhinovirus. Pathogens include, e.g., Mycobacterium tuberculosis, Streptococcus agalactiae, Legionella pneumophila, Streptococcus pyogenes, Hemophilus influenzae B influenza virus, respiratory syncytial virus (RSV), or Mycobacterium tuberculosis

[0336] In some cases, the target sequence is a portion of a nucleic acid from a virus or a bacterium or other agents responsible for a disease in the sample. The target sequence, in some cases, is a portion of a nucleic acid from a sexually transmitted infection or a contagious disease, in the sample. The target sequence, in some cases, is a portion of a nucleic acid from an upper respiratory tract infection, a lower respiratory tract infection, or a contagious disease, in the sample. The target sequence, in some cases, is a portion of a nucleic acid from a hospital acquired infection or a contagious disease, in the sample. The target sequence, in some cases, is a portion of a nucleic acid from sepsis, in the sample. These diseases can include but are not limited to respiratory viruses (e.g., COVID-19, SARS, MERS, influenza and the like) human immunodeficiency virus (HIV), human papillomavirus (HPV), chlamydia, gonorrhea, syphilis, trichomoniasis, sexually transmitted infection, malaria, Dengue fever, Ebola, chikungunya, and leishmaniasis. Pathogens include viruses, fungi, helminths, protozoa, malarial parasites, Plasmodium parasites, Toxoplasma parasites, and Schistosoma parasites. Helminths include roundworms, heartworms, and phytophagous nematodes, flukes, Acanthocephala, and tapeworms. Protozoan infections include infections from Giardia spp., Trichomonas spp., African trypanosomiasis, amoebic dysentery, babesiosis, balantidial dysentery, Chaga's disease, coccidiosis, malaria and toxoplasmosis. Examples of pathogens such as parasitic/protozoan pathogens include, but are not limited to: Plasmodium falciparum, P. vivax, Trypanosoma cruzi and Toxoplasma gondii. Fungal pathogens include, but are not limited to Cryptococcus neoformans, Histoplasma capsulatum, Coccidioides immitis, Blastomyces dermatitides, Chlamydia trachomatis, and Candida albicans. Pathogenic viruses include but are not limited to: respiratory viruses (e.g., adenoviruses, parainfluenza viruses, severe acute respiratory syndrome (SARS), coronavirus, MERS), gastrointestinal viruses (e.g., noroviruses, rotaviruses, some adenoviruses, astroviruses), exanthematous viruses (e.g. the virus that causes measles, the virus that causes rubella, the virus that causes chickenpox/shingles, the virus that causes roseola, the virus that causes smallpox, the virus that causes fifth disease, chikungunya virus infection); hepatic viral diseases (e.g., hepatitis A, B, C, D, E); cutaneous viral diseases (e.g. warts (including genital, anal), herpes (including oral, genital, anal), molluscum contagiosum); hemmorhagic viral diseases (e.g. Ebola, Lassa fever, dengue fever, yellow fever, Marburg hemorrhagic fever, Crimean-Congo hemorrhagic fever); neurologic viruses (e.g., polio, viral meningitis, viral encephalitis, rabies), sexually transmitted viruses (e.g., HIV, HPV, and the like), immunodeficiency virus (e.g., HIV); influenza virus; dengue; West Nile virus; herpes virus; yellow fever virus; Hepatitis Virus C; Hepatitis Virus A; Hepatitis Virus B; papillomavirus; and the like. Pathogens include, e.g., HIV virus, Mycobacterium tuberculosis, Klebsiella pneumoniae, Acinetobacter baumannii, Burkholderia cepacia, Streptococcus agalactiae, methicillin-resistant Staphylococcus aureus, Legionella pneumophila, Streptococcus pyogenes, Escherichia coli, Neisseria gonorrhoeae, Neisseria meningitidis, Pneumococcus, Cryptococcus neoformans, Histoplasma capsulatum, Hemophilus influenzae B, Treponema pallidum, Lyme disease spirochetes, Pseudomonas aeruginosa, Mycobacterium leprae, Brucella abortus, rabies virus, influenza virus, cytomegalovirus, herpes simplex virus I, herpes simplex virus II, human serum parvo-like virus, respiratory syncytial virus (RSV), M. genitalium, T. Vaginalis, varicella-zoster virus, hepatitis B virus, hepatitis C virus, measles virus, adenovirus, human T-cell leukemia viruses, Epstein-Barr virus, murine leukemia virus, mumps virus, vesicular stomatitis virus, Sindbis virus, lymphocytic choriomeningitis virus, wart virus, blue tongue virus, Sendai virus, feline leukemia virus, Reovirus, polio virus, simian virus 40, mouse mammary tumor virus, dengue virus, rubella virus, West Nile virus, Plasmodium falciparum, Plasmodium vivax, Toxoplasma gondii, Trypanosoma rangeli, Trypanosoma cruzi, Trypanosoma rhodesiense, Trypanosoma brucei, Schistosoma mansoni, Schistosoma japonicum, Babesia bovis, Eimeria tenella, Onchocerca volvulus, Leishmania tropica, Mycobacterium tuberculosis, Trichinella spiralis, Theileria parva, Taenia hydatigena, Taenia ovis, Taenia saginata, Echinococcus granulosus, Mesocestoides corti, Mycoplasma arthritidis, M. hyorhinis, M. orale, M. arginini, Acholeplasma laidlawii, M. salivarium, M. pneumoniae, Enterobacter cloacae, Kiebsiella aerogenes, Proteus vulgaris, Serratia macesens, Enterococcus faecalis, Enterococcus faecium, Streptococcus intermdius, Streptococcus pneumoniae, and Streptococcus pyogenes. Often the target nucleic acid comprises a sequence from a virus or a bacterium or other agents responsible for a disease that can be found in the sample. In some cases, the target nucleic acid is a portion of a nucleic acid from a genomic locus, a transcribed mRNA, or a reverse transcribed cDNA from a gene locus in at least one of: human immunodeficiency virus (HIV), human papillomavirus (HPV), chlamydia, gonorrhea, syphilis, trichomoniasis, sexually transmitted infection, malaria, Dengue fever, Ebola, chikungunya, and leishmaniasis. Pathogens include viruses, fungi, helminths, protozoa, malarial parasites, Plasmodium parasites, Toxoplasma parasites, and Schistosoma parasites. Helminths include roundworms, heartworms, and phytophagous nematodes, flukes, Acanthocephala, and tapeworms. Protozoan infections include infections from Giardia spp., Trichomonas spp., African trypanosomiasis, amoebic dysentery, babesiosis, balantidial dysentery, Chaga's disease, coccidiosis, malaria and toxoplasmosis. Examples of pathogens such as parasitic/protozoan pathogens include, but are not limited to: Plasmodium falciparum, P. vivax, Trypanosoma cruzi and Toxoplasma gondii. Fungal pathogens include, but are not limited to Cryptococcus neoformans, Histoplasma capsulatum, Coccidioides immitis, Blastomyces dermatitides, Chlamydia trachomatis, and Candida albicans. Pathogenic viruses include but are not limited to immunodeficiency virus (e.g., HIV); influenza virus; dengue; West Nile virus; herpes virus; yellow fever virus; Hepatitis Virus C; Hepatitis Virus A; Hepatitis Virus B; papillomavirus; and the like. Pathogens include, e.g., HIV virus, Mycobacterium tuberculosis, Streptococcus agalactiae, methicillin-resistant Staphylococcus aureus, Legionella pneumophila, Streptococcus pyogenes, Escherichia coli, Neisseria gonorrhoeae, Neisseria meningitidis, Pneumococcus, Cryptococcus neoformans, Histoplasma capsulatum, Hemophilus influenzae B, Treponema pallidum, Lyme disease spirochetes, Pseudomonas aeruginosa, Mycobacterium leprae, Brucella abortus, rabies virus, influenza virus, cytomegalovirus, herpes simplex virus I, herpes simplex virus II, human serum parvo-like virus, respiratory syncytial virus (RSV), M. genitalium, T. vaginalis, varicella-zoster virus, hepatitis B virus, hepatitis C virus, measles virus, adenovirus, human T-cell leukemia viruses, Epstein-Barr virus, murine leukemia virus, mumps virus, vesicular stomatitis virus, Sindbis virus, lymphocytic choriomeningitis virus, wart virus, blue tongue virus, Sendai virus, feline leukemia virus, Reovirus, polio virus, simian virus 40, mouse mammary tumor virus, dengue virus, rubella virus, West Nile virus, Plasmodium falciparum, Plasmodium vivax, Toxoplasma gondii, Trypanosoma rangeli, Trypanosoma cruzi, Trypanosoma rhodesiense, Trypanosoma brucei, Schistosoma mansoni, Schistosoma japonicum, Babesia bovis, Eimeria tenella, Onchocerca volvulus, Leishmania tropica, Mycobacterium tuberculosis, Trichinella spiralis, Theileria parva, Taenia hydatigena, Taenia ovis, Taenia saginata, Echinococcus granulosus, Mesocestoides corti, Mycoplasma arthritidis, M. hyorhinis, M. orale, M. arginini, Acholeplasma laidlawii, M. salivarium and M. pneumoniae. In some cases, the target sequence is a portion of a nucleic acid from a genomic locus, a transcribed mRNA, or a reverse transcribed cDNA from a gene locus of bacterium or other agents responsible for a disease in the sample comprising a mutation that confers resistance to a treatment, such as a single nucleotide mutation that confers resistance to antibiotic treatment.

[0337] The sample used for cancer testing or cancer risk testing can comprise at least one target nucleic acid segment that can bind to a guide nucleic acid of the reagents described herein. The target nucleic acid segment, in some cases, is a portion of a nucleic acid from a gene with a mutation associated with cancer, from a gene whose overexpression is associated with cancer, a tumor suppressor gene, an oncogene, a checkpoint inhibitor gene, a gene associated with cellular growth, a gene associated with cellular metabolism, or a gene associated with cell cycle. Sometimes, the target nucleic acid encodes for a cancer biomarker, such as a prostate cancer biomarker or non-small cell lung cancer. In some cases, the assay can be used to detect “hotspots” in target nucleic acids that can be predictive of cancer, such as lung cancer, cervical cancer, in some cases, the cancer can be a cancer that is caused by a virus. Some non-limiting examples of viruses that cause cancers in humans include Epstein-Barr virus (e.g., Burkitt's lymphoma, Hodgkin's Disease, and nasopharyngeal carcinoma); papillomavirus (e.g., cervical carcinoma, anal carcinoma, oropharyngeal carcinoma, penile carcinoma); hepatitis B and C viruses (e.g., hepatocellular carcinoma); human adult T-cell leukemia virus type 1 (HTLV-1) (e.g., T-cell leukemia); and Merkel cell polyomavirus (e.g., Merkel cell carcinoma). One skilled in the art will recognize that viruses can cause or contribute to other types of cancers. In some cases, the target nucleic acid is a portion of a nucleic acid that is associated with a blood fever. In some cases, the target nucleic acid segment is a portion of a nucleic acid from a genomic locus, a transcribed mRNA, or a reverse transcribed cDNA from a locus of at least one of: ALK, APC, ATM, AXIN2, BAP1, BARD1, BLM, BMPR1A, BRCA1, BRCA2, BRIP1, CASR, CDC73, CDH1, CDK4, CDKN1B, CDKN1C, CDKN2A, CEBPA, CHEK2, CTNNA1, DICER1, DIS3L2, EGFR, EPCAM, FH, FLCN, GATA2, GPC3, GREM1, HOXB13, HRAS, KIT, MAX, MEN1, MET, MITF, MLH1, MSH2, MSH3, MSH6, MUTYH, NBN, NF1, NF2, NTHL1, PALB2, PDGFRA, PHOX2B, PMS2, POLD1, POLE, POT1, PRKAR1A, PTCH1, PTEN, RAD50, RAD51C, RAD51D, RB1, RECQL4, RET, RUNX1, SDHA, SDHAF2, SDHB, SDHC, SDHD, SMAD4, SMARCA4, SMARCB1, SMARCE1, STK11, SUFU, TERC, TERT, TMEM127, TP53, TSC1, TSC2, VHL, WRN, and WT1.

[0338] The sample used for genetic disorder testing can comprise at least one target nucleic acid segment that can bind to a guide nucleic acid of the reagents described herein. In some embodiments, the genetic disorder is hemophilia, sickle cell anemia, β-thalassemia, Duchene muscular dystrophy, severe combined immunodeficiency, or cystic fibrosis. The target nucleic acid segment, in some cases, is a portion of a nucleic acid from a gene with a mutation associated with a genetic disorder, from a gene whose overexpression is associated with a genetic disorder, from a gene associated with abnormal cellular growth resulting in a genetic disorder, or from a gene associated with abnormal cellular metabolism resulting in a genetic disorder. In some cases, the target nucleic acid segment is a portion of a nucleic acid from a genomic locus, a transcribed mRNA, or a reverse transcribed cDNA from a locus of at least one of: CFTR, FMR1, SMN1, ABCB11, ABCC8, ABCD1, ACAD9, ACADM, ACADVL, ACAT1, ACOX1, ACSF3, ADA, ADAMTS2, ADGRG1, AGA, AGL, AGPS, AGXT, AIRE, ALDH3A2, ALDOB, ALG6, ALMS1, ALPL, AMT, AQP2, ARG1, ARSA, ARSB, ASL, ASNS, ASPA, ASS1, ATM, ATP6V1B1, ATP7A, ATP7B, ATRX, BBS1, BBS10, BBS12, BBS2, BCKDHA, BCKDHB, BCS1L, BLM, BSND, CAPN3, CBS, CDH23, CEP290, CERKL, CHM, CHRNE, CIITA, CLN3, CLN5, CLN6, CLN8, CLRN1, CNGB3, COL27A1, COL4A3, COL4A4, COL4A5, COL7A1, CPS1, CPT1A, CPT2, CRB1, CTNS, CTSK, CYBA, CYBB, CYP11B1, CYP11B2, CYP17A1, CYP19A1, CYP27A1, DBT, DCLRE1C, DHCR7, DHDDS, DLD, DMD, DNAH5, DNAI1, DNAI2, DYSF, EDA, EIF2B5, EMD, ERCC6, ERCC8, ESCO2, ETFA, ETFDH, ETHE1, EVC, EVC2, EYS, F9, FAH, FAM161A, FANCA, FANCC, FANCG, FH, FKRP, FKTN, G6PC, GAA, GALC, GALK1, GALT, GAMT, GBA, GBE1, GCDH, GFM1, GJB1, GJB2, GLA, GLB1, GLDC, GLE1, GNE, GNPTAB, GNPTG, GNS, GRHPR, HADHA, HAX1, HBA1, HBA2, HBB, HEXA, HEXB, HGSNAT, HLCS, HMGCL, HOGA1, HPS1, HPS3, HSD17B4, HSD3B2, HYAL1, HYLS1, IDS, IDUA, IKBKAP, IL2RG, IVD, KCNJ11, LAMA2, LAMA3, LAMB3, LAMC2, LCA5, LDLR, LDLRAP1, LHX3, LIFR, LIPA, LOXHD1, LPL, LRPPRC, MAN2B1, MCOLN1, MED17, MESP2, MFSD8, MKS1, MLC1, MMAA, MMAB, MMACHC, MMADHC, MPI, MPL, MPV17, MTHFR, MTM1, MTRR, MTTP, MUT, MYO7A, NAGLU, NAGS, NBN, NDRG1, NDUFAF5, NDUFS6, NEB, NPC1, NPC2, NPHS1, NPHS2, NR2E3, NTRK1, OAT, OPA3, OTC, PAH, PC, PCCA, PCCB, PCDH15, PDHA1, PDHB, PEX1, PEX10, PEX12, PEX2, PEX6, PEX7, PFKM, PHGDH, PKHD1, PMM2, POMGNT1, PPT1, PROP1, PRPS1, PSAP, PTS, PUS1, PYGM, RAB23, RAG2, RAPSN, RARS2, RDH12, RMRP, RPE65, RPGRIP1L, RS1, RTEL1, SACS, SAMHD1, SEPSECS, SGCA, SGCB, SGCG, SGSH, SLC12A3, SLC12A6, SLC17A5, SLC22A5, SLC25A13, SLC25A15, SLC26A2, SLC26A4, SLC35A3, SLC37A4, SLC39A4, SLC4A11, SLC6A8, SLC7A7, SMARCAL1, SMPD1, STAR, SUMF1, TAT, TCIRG1, TECPR2, TFR2, TGM1, TH, TMEM216, TPP1, TRMU, TSFM, TTPA, TYMP, USH1C, USH2A, VPS13A, VPS13B, VPS45, VRK1, VSX2, WNT10A, XPA, XPC, and ZFYVE26.

[0339] In some embodiments, the target nucleic acid sequence comprises a nucleic acid sequence of a virus, a bacterium, or other pathogen responsible for a disease in a plant (e.g., a crop). Methods and compositions of the disclosure can be used to treat or detect a disease in a plant. For example, the methods of the disclosure can be used to target a viral nucleic acid sequence in a plant. A programmable nuclease of the disclosure can cleave the viral nucleic acid. In some embodiments, the target nucleic acid sequence comprises a nucleic acid sequence of a virus or a bacterium or other agents (e.g., any pathogen) responsible for a disease in the plant (e.g., a crop). In some embodiments, the target nucleic acid comprises DNA that is reverse transcribed from RNA using a reverse transcriptase prior to detection by a programmable nuclease using the compositions, systems, and methods disclosed herein. The target nucleic acid, in some cases, is a portion of a nucleic acid from a virus or a bacterium or other agents responsible for a disease in the plant (e.g., a crop). In some cases, the target nucleic acid is a portion of a nucleic acid from a genomic locus, or any DNA amplicon, such as a reverse transcribed mRNA or a cDNA from a gene locus, a transcribed mRNA, or a reverse transcribed cDNA from a gene locus in at a virus or a bacterium or other agents (e.g., any pathogen) responsible for a disease in the plant (e.g., a crop). A virus infecting the plant can be an RNA virus. A virus infecting the plant can be a DNA virus. Non-limiting examples of viruses that can be targeted with the disclosure include Tobacco mosaic virus (TMV), Tomato spotted wilt virus (TSWV), Cucumber mosaic virus (CMV), Potato virus Y (PVY), Cauliflower mosaic virus (CaMV) (RT virus), Plum pox virus (PPV), Brome mosaic virus (BMV) and Potato virus X (PVX).

[0340] The plant can be a monocotyledonous plant. The plant can be a dicotyledonous plant. Non-limiting examples of orders of dicotyledonous plants include Magniolales, Illiciales, Laurales, Piperales, Aristochiales, Nymphaeales, Ranunculales, Papeverales, Sarraceniaceae, Trochodendrales, Hamamelidales, Eucomiales, Leitneriales, Myricales, Fagales, Casuarinales, Caryophyllales, Batales, Polygonales, Plumbaginales, Dilleniales, Theales, Malvales, Urticales, Lecythidales, Violales, Salicales, Capparales, Ericales, Diapensales, Ebenales, Primulales, Rosales, Fabales, Podostemales, Haloragales, Myrtales, Cornales, Proteales, San tales, Rafflesiales, Celastrales, Euphorbiales, Rhamnales, Sapindales, Juglandales, Geraniales, Polygalales, Umbellales, Gentianales, Polemoniales, Lamiales, Plantaginales, Scrophulariales, Campanulales, Rubiales, Dipsacales, and Asterales.

[0341] Non-limiting examples of orders of monocotyledonous plants include Alismatales, Hydrocharitales, Najadales, Triuridales, Commelinales, Eriocaulales, Restionales, Poales, Juncales, Cyperales, Typhales, Bromeliales, Zingiberales, Arecales, Cyclanthales, Pandanales, Arales, Lilliales, and Orchid ales. A plant can belong to the order, for example, Gymnospermae, Pinales, Ginkgoales, Cycadales, Araucariales, Cupressales and Gnetales.

[0342] Non-limiting examples of plants include plant crops, fruits, vegetables, grains, soy bean, corn, maize, wheat, seeds, tomatoes, rice, cassava, sugarcane, pumpkin, hay, potatoes, cotton, cannabis, tobacco, flowering plants, conifers, gymnosperms, ferns, clubmosses, hornworts, liverworts, mosses, wheat, maize, rice, millet, barley, tomato, apple, pear, strawberry, orange, acacia, carrot, potato, sugar beets, yam, lettuce, spinach, sunflower, rape seed, Arabidopsis, alfalfa, amaranth, apple, apricot, artichoke, ash tree, asparagus, avocado, banana, barley, beans, beet, birch, beech, blackberry, blueberry, broccoli, Brussel's sprouts, cabbage, canola, cantaloupe, carrot, cassava, cauliflower, cedar, a cereal, celery, chestnut, cherry, Chinese cabbage, citrus, clementine, clover, coffee, corn, cotton, cowpea, cucumber, cypress, eggplant, elm, endive, eucalyptus, fennel, figs, fir, geranium, grape, grapefruit, groundnuts, ground cherry, gum hemlock, hickory, kale, kiwifruit, kohlrabi, larch, lettuce, leek, lemon, lime, locust, pine, maidenhair, maize, mango, maple, melon, millet, mushroom, mustard, nuts, oak, oats, oil palm, okra, onion, orange, an ornamental plant or flower or tree, papaya, palm, parsley, parsnip, pea, peach, peanut, pear, peat, pepper, persimmon, pigeon pea, pine, pineapple, plantain, plum, pomegranate, potato, pumpkin, radicchio, radish, rapeseed, raspberry, rice, rye, sorghum, safflower, sallow, soybean, spinach, spruce, squash, strawberry, sugar beet, sugarcane, sunflower, sweet potato, sweet corn, tangerine, tea, tobacco, tomato, trees, triticale, turf grasses, turnips, vine, walnut, watercress, watermelon, wheat, yams, yew, and zucchini. A plant can include algae.

[0343] The sample can be used for identifying a disease status. For example, a sample is any sample described herein, and is obtained from a subject for use in identifying a disease status of a subject. Sometimes, a method comprises obtaining a serum sample from a subject; and identifying a disease status of the subject.

[0344] In some instances, the target nucleic acid is a single stranded nucleic acid. Alternatively or in combination, the target nucleic acid is a double stranded nucleic acid and is prepared into single stranded nucleic acids before or upon contacting the reagents. The target nucleic acid may be a RNA, DNA, synthetic nucleic acids, or nucleic acids found in biological or environmental samples. The target nucleic acids include but are not limited to mRNA, rRNA, tRNA, non-coding RNA, long non-coding RNA, and microRNA (miRNA). In some cases, the target nucleic acid is mRNA. In some cases, the target nucleic acid is from a virus, a parasite, or a bacterium described herein. In some cases, the target nucleic acid is transcribed from a gene as described herein.

[0345] A number of target nucleic acids are consistent with the methods and compositions disclosed herein. Some methods described herein can detect a target nucleic acid present in the sample in various concentrations or amounts as a target nucleic acid population. In some cases, the sample has at least 2 target nucleic acids. In some cases, the sample has at least 3, 5, 10, 20, 30, 40, 50, 100, 200, 300, 400, 500, 600, 700, 800, 900, 1000, 2000, 3000, 4000, 5000, 6000, 7000, 8000, 9000, or 10000 target nucleic acids. In some cases, the method detects target nucleic acid present at least at one copy per 10¹ non-target nucleic acids, 10² non-target nucleic acids, 10³ non-target nucleic acids, 10⁴ non-target nucleic acids, 10⁵ non-target nucleic acids, 10⁶ non-target nucleic acids, 10⁷ non-target nucleic acids, 10⁸ non-target nucleic acids, 10⁹ non-target nucleic acids, or 10¹⁰ non-target nucleic acids.

[0346] A number of target nucleic acid populations are consistent with the methods and compositions disclosed herein. Some methods described herein can detect two or more target nucleic acid populations present in the sample in various concentrations or amounts. In some cases, the sample has at least 2 target nucleic acid populations. In some cases, the sample has at least 3, 4, 5, 6, 7, 8, 9, 10, 20, 30, 40, or 50 target nucleic acid populations. In some cases, the method detects target nucleic acid populations that are present at least at one copy per 10¹ non-target nucleic acids, 10² non-target nucleic acids, 10³ non-target nucleic acids, 10⁴ non-target nucleic acids, 10⁵ non-target nucleic acids, 10⁶ non-target nucleic acids, 10⁷ non-target nucleic acids, 10⁸ non-target nucleic acids, 10⁹ non-target nucleic acids, or 10¹⁰ non-target nucleic acids. The target nucleic acid populations can be present at different concentrations or amounts in the sample.

[0347] Any of the above disclosed samples are consistent with the systems, assays, and programmable nucleases disclosed herein and can be used as a companion diagnostic with any of the diseases disclosed herein (e.g., influenza A, influenza B, RSV), or can be used in reagent kits, point-of-care diagnostics, or over-the-counter diagnostics.

Reagents A number of reagents are consistent with the devices, systems, fluidic devices, kits, and methods disclosed herein. These reagents are, for example, consistent for use within various fluidic devices disclosed herein for detection of a target nucleic acid (e.g., influenza A or influenza B) within the sample, wherein the fluidic device may comprise multiple pumps, valves, reservoirs, and chambers for sample preparation, amplification of a target nucleic acid within the sample, mixing with a programmable nuclease, and detection of a detectable signal arising from cleavage of detector nucleic acids by the programmable nuclease within the fluidic system itself. These reagents are compatible with the samples, fluidic devices, and support mediums as described herein for detection of an ailment, such as a disease. The reagents described herein for detecting a disease, such as influenza or RSV, comprise a guide nucleic acid targeting the target nucleic acid segment indicative of the disease. The guide nucleic acid binds to the single stranded target nucleic acid comprising a portion of a nucleic acid from a virus or a bacterium or other agents responsible for a disease as described herein. The guide nucleic acid can bind to the single stranded target nucleic acid comprising a portion of a nucleic acid from a bacterium or other agents responsible for a disease as described herein and further comprising a mutation, such as a single nucleotide polymorphism (SNP), that can confer resistance to a treatment, such as antibiotic treatment. The guide nucleic acid binds to the single stranded target nucleic acid comprising a portion of a nucleic acid from an influenza virus, such as influenza A or influenza B. The guide nucleic acid is complementary to the target nucleic acid. Often the guide nucleic acid binds specifically to the target nucleic acid. The target nucleic acid may be a RNA, DNA, or synthetic nucleic acids.

[0348] Disclosed herein are methods of assaying for a target nucleic acid as described herein. For example, a method of assaying for a target nucleic acid in a sample comprises contacting the sample to a complex comprising a guide nucleic acid comprising a segment that is reverse complementary to a segment of the target nucleic acid and a programmable nuclease that exhibits sequence independent cleavage upon forming a complex comprising the segment of the guide nucleic acid binding to the segment of the target nucleic acid; and assaying for a signal indicating cleavage of at least some protein-nucleic acids of a population of protein-nucleic acids, wherein the signal indicates a presence of the target nucleic acid in the sample and wherein absence of the signal indicates an absence of the target nucleic acid in the sample. As another example, a method of assaying for a target nucleic acid in a sample, for example, comprises: a) contacting the sample to a complex comprising a guide nucleic acid comprising a segment that is reverse complementary to a segment of the target nucleic acid and a programmable nuclease that exhibits sequence independent cleavage upon forming a complex comprising the segment of the guide nucleic acid binding to the segment of the target nucleic acid; b) contacting the complex to a substrate; c) contacting the substrate to a reagent that differentially reacts with a cleaved substrate; and d) assaying for a signal indicating cleavage of the substrate, wherein the signal indicates a presence of the target nucleic acid in the sample and wherein absence of the signal indicates an absence of the target nucleic acid in the sample. Often, the substrate is an enzyme-nucleic acid. Sometimes, the substrate is an enzyme substrate-nucleic acid.

[0349] A programmable nuclease can comprise a programmable nuclease capable of being activated when complexed with a guide nucleic acid and target nucleic acid. The programmable nuclease can become activated after binding of a guide nucleic acid with a target nucleic acid, in which the activated programmable nuclease can cleave the target nucleic acid and can have trans cleavage activity. Trans cleavage activity can be non-specific cleavage of nearby single-stranded nucleic acids by the activated programmable nuclease, such as trans cleavage of detector nucleic acids with a detection moiety. Once the detector nucleic acid is cleaved by the activated programmable nuclease, the detection moiety can be released from the detector nucleic acid and can generate a signal. A signal can be a calorimetric, potentiometric, amperometric, optical (e.g., fluorescent, colorometric, etc.), or piezo-electric signal. Often, the signal is present prior to detector nucleic acid cleavage and changes upon detector nucleic acid cleavage. Sometimes, the signal is absent prior to detector nucleic acid cleavage and is present upon detector nucleic acid cleavage. The detectable signal can be immobilized on a support medium for detection. The programmable nuclease can be a CRISPR-Cas (clustered regularly interspaced short palindromic repeats—CRISPR associated) nucleoprotein complex with trans cleavage activity, which can be activated by binding of a guide nucleic acid with a target nucleic acid. The CRISPR-Cas nucleoprotein complex can comprise a Cas protein (also referred to as a Cas nuclease) complexed with a guide nucleic acid, which can also be referred to as CRISPR enzyme. A guide nucleic acid can be a CRISPR RNA (crRNA). Sometimes, a guide nucleic acid comprises a crRNA and a trans-activating crRNA (tracrRNA).

[0350] The CRISPR/Cas system used to detect a modified target nucleic acids can comprise CRISPR RNAs (crRNAs), trans-activating crRNAs (tracrRNAs), Cas proteins, and detector nucleic acids.

[0351] A guide nucleic acid can comprise a sequence that is reverse complementary to the sequence of a target nucleic acid. A guide nucleic acid can be a crRNA. Sometimes, a guide nucleic acid comprises a crRNA and tracrRNA. The guide nucleic acid can bind specifically to the target nucleic acid. In some cases, the guide nucleic acid is not naturally occurring and made by artificial combination of otherwise separate segments of sequence. Often, the artificial combination is performed by chemical synthesis, by genetic engineering techniques, or by the artificial manipulation of isolated segments of nucleic acids. The target nucleic acid can be designed and made to provide desired functions. In some cases, the targeting region of a guide nucleic acid is 20 nucleotides in length. The targeting region of the guide nucleic acid may have a length of at least 10, 11, 12, 13, 14, 15, 16, 17, 18, 19, 20, 21, 22, 23, 24, 25, 26, 27, 28, 29, or 30 nucleotides in length. In some instances, the targeting region of the guide nucleic acid is 10, 11, 12, 13, 14, 15, 16, 17, 18, 19, 20, 21, 22, 23, 24, 25, 26, 27, 28, 29, or 30 nucleotides in length. In some cases, the targeting region of a guide nucleic acid has a length from exactly or about 12 nucleotides (nt) to about 80 nt, from about 12 nt to about 50 nt, from about 12 nt to about 45 nt, from about 12 nt to about 40 nt, from about 12 nt to about 35 nt, from about 12 nt to about 30 nt, from about 12 nt to about 25 nt, from about 12 nt to about 20 nt, from about 12 nt to about 19 nt, from about 19 nt to about 20 nt, from about 19 nt to about 25 nt, from about 19 nt to about 30 nt, from about 19 nt to about 35 nt, from about 19 nt to about 40 nt, from about 19 nt to about 45 nt, from about 19 nt to about 50 nt, from about 19 nt to about 60 nt, from about 20 nt to about 25 nt, from about 20 nt to about 30 nt, from about 20 nt to about 35 nt, from about 20 nt to about 40 nt, from about 20 nt to about 45 nt, from about 20 nt to about 50 nt, or from about 20 nt to about 60 nt. It is understood that the sequence of a polynucleotide need not be 100% complementary to that of its target nucleic acid to be specifically hybridizable or hybridizable or bind specifically. The guide nucleic acid can have a sequence comprising at least one uracil in a region from nucleic acid residue 5 to 20 that is reverse complementary to a modification variable region in the target nucleic acid. The guide nucleic acid, in some cases, has a sequence comprising at least one uracil in a region from nucleic acid residue 5 to 9, 10 to 14, or 15 to 20 that is reverse complementary to a modification variable region in the target nucleic acid. The guide nucleic acid can have a sequence comprising at least one uracil in a region from nucleic acid residue 5 to 20 that is reverse complementary to a methylation variable region in the target nucleic acid. The guide nucleic acid, in some cases, has a sequence comprising at least one uracil in a region from nucleic acid residue 5 to 9, 10 to 14, or 15 to 20 that is reverse complementary to a methylation variable region in the target nucleic acid.

[0352] The guide nucleic acid can be selected from a group of guide nucleic acids that have been tiled against the nucleic acid sequence of a strain of an infection or genomic locus of interest. The guide nucleic acid can be selected from a group of guide nucleic acids that have been tiled against the nucleic acid sequence of a strain of influenza A or influenza B. Often, guide nucleic acids that are tiled against the nucleic acid of a strain of an infection or genomic locus of interest can be pooled for use in a method described herein. Often, these guide nucleic acids are pooled for detecting a target nucleic acid in a single assay. The pooling of guide nucleic acids that are tiled against a single target nucleic acid can enhance the detection of the target nucleic using the methods described herein. The pooling of guide nucleic acids that are tiled against a single target nucleic acid can ensure broad coverage of the target nucleic acid within a single reaction using the methods described herein. The tiling, for example, is sequential along the target nucleic acid. Sometimes, the tiling is overlapping along the target nucleic acid. In some instances, the tiling comprises gaps between the tiled guide nucleic acids along the target nucleic acid. In some instances the tiling of the guide nucleic acids is non-sequential. Often, a method for detecting a target nucleic acid comprises contacting a target nucleic acid to a pool of guide nucleic acids and a programmable nuclease, wherein a guide nucleic acid of the pool of guide nucleic acids has a sequence selected from a group of tiled guide nucleic acid that correspond to nucleic acids of a target nucleic acid; and assaying for a signal produce by cleavage of at least some detector nucleic acids of a population of detector nucleic acids. Pooling of guide nucleic acids can ensure broad spectrum identification, or broad coverage, of a target species within a single reaction. This can be particularly helpful in diseases or indications, like sepsis, that may be caused by multiple organisms.

[0353] Described herein are reagents comprising a programmable nuclease capable of being activated when complexed with the guide nucleic acid and the target nucleic acid segment. A programmable nuclease can be capable of being activated when complexed with a guide nucleic acid and the target sequence. The programmable nuclease can be activated upon binding of the guide nucleic acid to its target nucleic acid and degrades non-specifically nucleic acid in its environment. The programmable nuclease has trans cleavage activity once activated. A programmable nuclease can be a Cas protein (also referred to, interchangeably, as a Cas nuclease). A crRNA and Cas protein can form a CRISPR enzyme.

[0354] “Percent identity” and “% identity” can refer to the extent to which two sequences (nucleotide or amino acid) have the same residue at the same positions in an alignment. For example, “an amino acid sequence is X % identical to SEQ ID NO: Y” can refer to % identity of the amino acid sequence to SEQ ID NO: Y and is elaborated as X % of residues in the amino acid sequence are identical to the residues of sequence disclosed in SEQ ID NO: Y. Generally, computer programs can be employed for such calculations. Illustrative programs that compare and align pairs of sequences, include ALIGN (Myers and Miller, Comput Appl Biosci. 1988 March; 4(1):11-7), FASTA (Pearson and Lipman, Proc Natl Acad Sci USA. 1988 April; 85(8):2444-8; Pearson, Methods Enzymol. 1990; 183:63-98) and gapped BLAST (Altschul et al., Nucleic Acids Res. 1997 Sep. 1; 25(17):3389-40), BLASTP, BLASTN, or GCG (Devereux et al., Nucleic Acids Res. 1984 Jan. 11; 12(1 Pt 1):387-95).

[0355] Several programmable nucleases are consistent with the methods and devices of the present disclosure. For example, CRISPR/Cas enzymes are programmable nucleases used in the methods and systems disclosed herein. CRISPR/Cas enzymes can include any of the known Classes and Types of CRISPR/Cas enzymes. Programmable nucleases disclosed herein include Class 1 CRISPR/Cas enzymes, such as the Type I, Type IV, or Type III CRISPR/Cas enzymes. Programmable nucleases disclosed herein also include the Class 2 CRISPR/Cas enzymes, such as the Type II, Type V, and Type VI CRISPR/Cas enzymes. Preferable programmable nucleases included in the several devices disclosed herein (e.g., a microfluidic device such as a pneumatic valve device or a sliding valve device or a lateral flow assay) and methods of use thereof include a Type V or Type VI CRISPR/Cas enzyme.

[0356] In some embodiments, the Type V CRISPR/Cas enzyme is a programmable Cas12 nuclease. Type V CRISPR/Cas enzymes (e.g., Cas12 or Cas14) lack an HNH domain. A Cas12 nuclease of the present disclosure cleaves a nucleic acids via a single catalytic RuvC domain. The RuvC domain is within a nuclease, or “NUC” lobe of the protein, and the Cas12 nucleases further comprise a recognition, or “REC” lobe. The REC and NUC lobes are connected by a bridge helix and the Cas12 proteins additionally include two domains for PAM recognition termed the PAM interacting (PI) domain and the wedge (WED) domain. (Murugan et al., Mol Cell. 2017 Oct. 5; 68(1): 15-25). A programmable Cas12 nuclease can be a Cas12a (also referred to as Cpf1) protein, a Cas12b protein, Cas12c protein, Cas12d protein, or a Cas12e protein. In some cases, a suitable Cas12 protein comprises an amino acid sequence having at least 80%, at least 85%, at least 90%, at least 95%, at least 98%, at least 99%, or 100%, amino acid sequence identity to any one of SEQ ID NO: 27-SEQ ID NO: 37.

TABLE 1
Cas12 Protein Sequences

| SEQ | | |
|---|---|---|
| ID | | |
| NO | Description | Sequence |
| SEQ | Lachnospiraceae | MSKLEKFTNCYSLSKTLRFKAIPVGKTQENIDNKRLLVEDEKRAEDYK |
| ID | bacterium | GVKKLLDRYYLSFINDVLHSIKLKNLNNYISLFRKKTRTEKENKELENL |
| NO: | ND2006 | EINLRKEIAKAFKGNEGYKSLFKKDIIETILPEFLDDKDEIALVNSFNGFT |
| 27 | (LbCas12a) | TAFTGFFDNRENMFSEEAKSTSIAFRCINENLTRYISNMDIFEKVDAIFD |
| | | KHEVQEIKEKILNSDYDVEDFFEGEFFNFVLTQEGIDVYNAIIGGFVTES |
| | | GEKIKGLNEYINLYNQKTKQKLPKFKPLYKQVLSDRESLSFYGEGYTSD |
| | | EEVLEVFRNTLNKNSEIFSSIKKLEKLFKNFDEYSSAGIFVKNGPAISTIS |
| | | KDIFGEWNVIRDKWNAEYDDIHLKKKAVVTEKYEDDRRKSFKKIGSFS |
| | | LEQLQEYADADLSVVEKLKEIIIQKVDEIYKVYGSSEKLFDADFVLEKSL |
| | | KKNDAVVAIMKDLLDSVKSFENYIKAFFGEGKETNRDESFYGDFVLAY |
| | | DILLKVDHIYDAIRNYVTQKPYSKDKFKLYFQNPQFMGGWDKDKETD |
| | | YRATILRYGSKYYLAIMDKKYAKCLQKIDKDDVNGNYEKINYKLLPGP |
| | | NKMLPKVFFSKKWMAYYNPSEDIQKIYKNGTFKKGDMFNLNDCHKLI |
| | | DFFKDSISRYPKWSNAYDFNFSETEKYKDIAGFYREVEEQGYKVSFESA |
| | | SKKEVDKLVEEGKLYMFQIYNKDFSDKSHGTPNLHTMYFKLLFDENN |
| | | HGQIRLSGGAELFMRRASLKKEELVVHPANSPIANKNPDNPKKTTTLSY |
| | | DVYKDKRFSEDQYELHIPIAINKCPKNIFKINTEVRVLLKHDDNPYVIGI |
| | | DRGERNLLYIVVVDGKGNIVEQYSLNEIINNFNGIRIKTDYHSLLDKKEK |
| | | ERFEARQNWTSIENIKELKAGYISQVVHKICELVEKYDAVIALEDLNSG |
| | | FKNSRVKVEKQVYQKFEKMLIDKLNYMVDKKSNPCATGGALKGYQIT |
| | | NKFESFKSMSTQNGFIFYIPAWLTSKIDPSTGFVNLLKTKYTSIADSKKFI |
| | | SSFDRIMYVPEEDLFEFALDYKNFSRTDADYIKKWKLYSYGNRIRIFRN |
| | | PKKNNVFDWEEVCLTSAYKELFNKYGINYQQGDIRALLCEQSDKAFYS |
| | | SFMALMSLMLQMRNSITGRTDVDFLISPVKNSDGIFYDSRNYEAQENAI |
| | | LPKNADANGAYNIARKVLWAIGQFKKAEDEKLDKVKIAISNKEWLEY |
| | | AQTSVKH |
| SEQ | Acidaminococcus | MTQFEGFTNLYQVSKTLRFELIPQGKTLKHIQEQGFIEEDKARNDHYKE |
| ID | sp. | LKPIIDRIYKTYADQCLQLVQLDWENLSAAIDSYRKEKTEETRNALIEEQ |
| NO: | BV316 | ATYRNAIHDYFIGRTDNLTDAINKRHAEIYKGLFKAELFNGKVLKQLGT |
| 28 | (AsCasl2a) | VTTTEHENALLRSFDKFTTYFSGFYENRKNVFSAEDISTAIPHRIVQDNF |
| | | PKFKENCHIFTRLITAVPSLREHFENVKKAIGIFVSTSIEEVFSFPFYNQLL |
| | | TQTQIDLYNQLLGGISREAGTEKIKGLNEVLNLAIQKNDETAHIIASLPH |
| | | RFIPLFKQILSDRNTLSFILEEFKSDEEVIQSFCKYKTLLRNENVLETAEA |
| | | LFNELNSIDLTHIFISHKKLETISSALCDHWDTLRNALYERRISELTGKIT |
| | | KSAKEKVQRSLKHEDINLQEIISAAGKELSEAFKQKTSEILSHAHAALDQ |
| | | PLPTTLKKQEEKEILKSQLDSLLGLYHLLDWFAVDESNEVDPEFSARLT |
| | | GIKLEMEPSLSFYNKARNYATKKPYSVEKFKLNFQMPTLASGWDVNKE |
| | | KNNGAILFVKNGLYYLGIMPKQKGRYKALSFEPTEKTSEGFDKMYYDY |
| | | FPDAAKMIPKCSTQLKAVTAHFQTHTTPILLSNNFIEPLEITKEIYDLNNP |
| | | EKEPKKFQTAYAKKTGDQKGYREALCKWIDFTRDFLSKYTKTTSIDLSS |
| | | LRPSSQYKDLGEYYAELNPLLYHISFQRIAEKEIMDAVETGKLYLFQIYN |
| | | KDFAKGHHGKPNLHTLYWTGLFSPENLAKTSIKLNGQAELFYRPKSRM |
| | | KRMAHRLGEKMLNKKLKDQKTPIPDTLYQELYDYVNHRLSHDLSDEA |
| | | RALLPNVITKEVSHEIIKDRRFTSDKFFFHVPITLNYQAANSPSKFNQRV |
| | | NAYLKEHPETPIIGIDRGERNLIYITVIDSTGKILEQRSLNTIQQFDYQKKL |
| | | DNREKERVAARQAWSVVGTIKDLKQGYLSQVIHEIVDLMIHYQAVVV |
| | | LENLNFGFKSKRTGIAEKAVYQQFEKMLIDKLNCLVLKDYPAEKVGGV |
| | | LNPYQLTDQFTSFAKMGTQSGFLFYVPAPYTSKIDPLTGFVDPFVWKTI |
| | | KNHESRKHFLEGFDFLHYDVKTGDFILHFKMNRNLSFQRGLPGFMPAW |
| | | DIVFEKNETQFDAKGTPFIAGKRIVPVIENHRFTGRYRDLYPANELIALL |
| | | EEKGIVFRDGSNILPKLLENDDSHAIDTMVALIRSVLQMRNSNAATGED |
| | | YINSPVRDLNGVCFDSRFQNPEWPMDADANGAYHIALKGQLLLNHLK |
| | | ESKDLKLQNGISNQDWLAYIQELRN |
| SEQ | Francisella | MSIYQEFVNKYSLSKTLRFELIPQGKTLENIKARGLILDDEKRAKDYKK |
| ID | novicida | AKQIIDKYHQFFIEEILSSVCISEDLLQNYSDVYFKLKKSDDDNLQKDFK |
| NO: | UH2 | SAKDTIKKQISEYIKDSEKFKNLFNQNLIDAKKGQESDLILWLKQSKDN |
| 29 | (FnCas12a) | GIELFKANSDITDIDEALEIIKSFKGWTTYFKGFHENRKNVYSSNDIPTSII |
| | | YRIVDDNLPKFLENKAKYESLKDKAPEAINYEQIKKDLAEELTFDIDYK |
| | | TSEVNQRVFSLDEVFEIANFNNYLNQSGITKFNTIIGGKFVNGENTKRKG |
| | | INEYINLYSQQINDKTLKKYKMSVLFKQILSDTESKSFVIDKLEDDSDVV |
| | | TTMQSFYEQIAAFKTVEEKSIKETLSLLFDDLKAQKLDLSKIYFKNDKSL |
| | | TDLSQQVFDDYSVIGTAVLEYITQQIAPKNLDNPSKKEQELIAKKTEKA |
| | | KYLSLETIKLALEEFNKHRDIDKQCRFEEILANFAAIPMIFDEIAQNKDN |
| | | LAQISIKYQNQGKKDLLQASAEDDVKAIKDLLDQTNNLLHKLKIFHISQ |
| | | SEDKANILDKDEHFYLVFEECYFELANIVPLYNKIRNYITQKPYSDEKFK |
| | | LNFENSTLANGWDKNKEPDNTAILFIKDDKYYLGVMNKKNNKIFDDK |
| | | AIKENKGEGYKKIVYKLLPGANKMLPKVFFSAKSIKFYNPSEDILRIRNH |
| | | STHTKNGSPQKGYEKFEFNIEDCRKFIDFYKQSISKHPEWKDFGFRFSDT |
| | | QRYNSIDEFYREVENQGYKLTFENISESYIDSVVNQGKLYLFQIYNKDFS |
| | | AYSKGRPNLHTLYWKALFDERNLQDVVYKLNGEAELFYRKQSIPKKIT |
| | | HPAKEAIANKNKDNPKKESVFEYDLIKDKRFTEDKFFFHCPITINFKSSG |
| | | ANKFNDEINLLLKEKANDVHILSIDRGERHLAYYTLVDGKGNIIKQDTF |
| | | NIIGNDRMKTNYHDKLAAIEKDRDSARKDWKKINNIKEMKEGYLSQV |
| | | VHEIAKLVIEYNAIVVFEDLNFGFKRGRFKVEKQVYQKLEKMLIEKLNY |
| | | LVFKDNEFDKTGGVLRAYQLTAPFETFKKMGKQTGIIYYVPAGFTSKIC |
| | | PVTGFVNQLYPKYESVSKSQEFFSKFDKICYNLDKGYFEFSFDYKNFGD |
| | | KAAKGKWTIASFGSRLINFRNSDKNHNWDTREVYPTKELEKLLKDYSI |
| | | EYGHGECIKAAICGESDKKFFAKLTSVLNTILQMRNSKTGTELDYLISPV |
| | | ADVNGNFFDSRQAPKNMPQDADANGAYHIGLKGLMLLGRIKNNQEGK |
| | | KLNLVIKNEEYFEFVQNRNN |
| SEQ | Porphyromonas | MKTQHFFEDFTSLYSLSKTIRFELKPIGKTLENIKKNGLIRRDEQRLDDY |
| ID | macacae | EKLKKVIDEYHEDFIANILSSFSFSEEILQSYIQNLSESEARAKIEKTMRD |
| NO: | (PmCas12a) | TLAKAFSEDERYKSIFKKELVKKDIPVWCPAYKSLCKKFDNFTTSLVPF |
| 30 | | HENRKNLYTSNEITASIPYRIVHVNLPKFIQNIEALCELQKKMGADLYLE |
| | | MMENLRNVWPSFVKTPDDLCNLKTYNHLMVQSSISEYNRFVGGYSTE |
| | | DGTKHQGINEWINIYRQRNKEMRLPGLVFLHKQILAKVDSSSFISDTLE |
| | | NDDQVFCVLRQFRKLFWNTVSSKEDDAASLKDLFCGLSGYDPEAIYVS |
| | | DAHLATISKNIFDRWNYISDAIRRKTEVLMPRKKESVERYAEKISKQIKK |
| | | RQSYSLAELDDLLAHYSEESLPAGFSLLSYFTSLGGQKYLVSDGEVILY |
| | | EEGSNIWDEVLIAFRDLQVILDKDFTEKKLGKDEEAVSVIKKALDSALR |
| | | LRKFFDLLSGTGAEIRRDSSFYALYTDRMDKLKGLLKMYDKVRNYLTK |
| | | KPYSIEKFKLHFDNPSLLSGWDKNKELNNLSVIFRQNGYYYLGIMTPKG |
| | | KNLFKTLPKLGAEEMFYEKMEYKQIAEPMLMLPKVFFPKKTKPAFAPD |
| | | QSVVDIYNKKTFKTGQKGFNKKDLYRLIDFYKEALTVHEWKLFNFSFS |
| | | PTEQYRNIGEFFDEVREQAYKVSMVNVPASYIDEAVENGKLYLFQIYN |
| | | KDFSPYSKGIPNLHTLYWKALFSEQNQSRVYKLCGGGELFYRKASLHM |
| | | QDTTVHPKGISIHKKNLNKKGETSLFNYDLVKDKRFTEDKFFFHVPISIN |
| | | YKNKKITNVNQMVRDYIAQNDDLQIIGIDRGERNLLYISRIDTRGNLLE |
| | | QFSLNVIESDKGDLRTDYQKILGDREQERLRRRQEWKSIESIKDLKDGY |
| | | MSQVVHKICNMVVEHKAIVVLENLNLSFMKGRKKVEKSVYEKFERML |
| | | VDKLNYLVVDKKNLSNEPGGLYAAYQLTNPLFSFEELHRYPQSGILFFV |
| | | DPWNTSLTDPSTGFVNLLGRINYTNVGDARKFFDRFNAIRYDGKGNILF |
| | | DLDLSRFDVRVETQRKLWTLTTFGSRIAKSKKSGKWMVERIENLSLCFL |
| | | ELFEQFNIGYRVEKDLKKAILSQDRKEFYVRLIYLFNLMMQIRNSDGEE |
| | | DYILSPALNEKNLQFDSRLIEAKDLPVDADANGAYNVARKGLMVVQRI |
| | | KRGDHESIHRIGRAQWLRYVQEGIVE |
| SEQ | Moraxella | MLFQDFTHLYPLSKTVRFELKPIDRTLEHIHAKNFLSQDETMADMHQK |
| ID | bovoculi | VKVILDDYHRDFIADMMGEVKLTKLAEFYDVYLKFRKNPKDDELQKQ |
| NO: | 237 | LKDLQAVLRKEIVKPIGNGGKYKAGYDRLFGAKLFKDGKELGDLAKF |
| 31 | (MbCas12a) | VIAQEGESSPKLAHLAHFEKFSTYFTGFHDNRKNMYSDEDKHTAIAYR |
| | | LIHENLPRFIDNLQILTTIKQKHSALYDQIINELTASGLDVSLASHLDGYH |
| | | KLLTQEGITAYNTLLGGISGEAGSPKIQGINELINSHHNQHCHKSERIAK |
| | | LRPLHKQILSDGMSVSFLPSKFADDSEMCQAVNEFYRHYADVFAKVQS |
| | | LFDGFDDHQKDGIYVEHKNLNELSKQAFGDFALLGRVLDGYYVDVVN |
| | | PEFNERFAKAKTDNAKAKLTKEKDKFIKGVHSLASLEQAIEHYTARHD |
| | | DESVQAGKLGQYFKHGLAGVDNPIQKIHNNHSTIKGFLERERPAGERA |
| | | LPKIKSGKNPEMTQLRQLKELLDNALNVAHFAKLLTTKTTLDNQDGNF |
| | | YGEFGVLYDELAKIPTLYNKVRDYLSQKPFSTEKYKLNFGNPTLLNGW |
| | | DLNKEKDNFGVILQKDGCYYLALLDKAHKKVFDNAPNTGKSIYQKMI |
| | | YKYLEVRKQFPKVFFSKEAIAINYHPSKELVEIKDKGRQRSDDERLKLY |
| | | RFILECLKIHPKYDKKFEGAIGDIQLFKKDKKGREVPISEKDLFDKINGIF |
| | | SSKPKLEMEDFFIGEFKRYNPSQDLVDQYNIYKKIDSNDNRKKENFYNN |
| | | HPKFKKDLVRYYYESMCKHEEWEESFEFSKKLQDIGCYVDVNELFTEI |
| | | ETRRLNYKISFCNINADYIDELVEQGQLYLFQIYNKDFSPKAHGKPNLH |
| | | TLYFKALFSEDNLADPIYKLNGEAQIFYRKASLDMNETTIHRAGEVLEN |
| | | KNPDNPKKRQFVYDIIKDKRYTQDKFMLHVPITMNFGVQGMTIKEFNK |
| | | KVNQSIQQYDEVNVIGIDRGERHLLYLTVINSKGEILEQCSLNDITTASA |
| | | NGTQMTTPYHKILDKREIERLNARVGWGEIETIKELKSGYLSHVVHQIS |
| | | QLMLKYNAIVVLEDLNFGFKRGRFKVEKQIYQNFENALIKKLNHLVLK |
| | | DKADDEIGSYKNALQLTNNFTDLKSIGKQTGFLFYVPAWNTSKIDPETG |
| | | FVDLLKPRYENIAQSQAFFGKFDKICYNADKDYFEFHIDYAKFTDKAK |
| | | NSRQIWTICSHGDKRYVYDKTANQNKGAAKGINVNDELKSLFARHHIN |
| | | EKQPNLVMDICQNNDKEFHKSLMYLLKTLLALRYSNASSDEDFILSPVA |
| | | NDEGVFFNSALADDTQPQNADANGAYHIALKGLWLLNELKNSDDLNK |
| | | VKLAIDNQTWLNFAQNR |
| SEQ | Moraxella | MGIHGVPAALFQDFTHLYPLSKTVRFELKPIGRTLEHIHAKNFLSQDET |
| ID | bovoculi | MADMYQKVKVILDDYHRDFIADMMGEVKLTKLAEFYDVYLKFRKNP |
| NO: | AAX08_00205 | KDDGLQKQLKDLQAVLRKESVKPIGSGGKYKTGYDRLFGAKLFKDGK |
| 32 | (Mb2Cas12a) | ELGDLAKFVIAQEGESSPKLAHLAHFEKFSTYFTGFHDNRKNMYSDED |
| | | KHTAIAYRLIHENLPRFIDNLQILTTIKQKHSALYDQIINELTASGLDVSL |
| | | ASHLDGYHKLLTQEGITAYNRIIGEVNGYTNKHNQICHKSERIAKLRPL |
| | | HKQILSDGMGVSFLPSKFADDSEMCQAVNEFYRHYTDVFAKVQSLFDG |
| | | FDDHQKDGIYVEHKNLNELSKQAFGDFALLGRVLDGYYVDVVNPEFN |
| | | ERFAKAKTDNAKAKLTKEKDKFIKGVHSLASLEQAIEHHTARHDDESV |
| | | QAGKLGQYFKHGLAGVDNPIQKIHNNHSTIKGFLERERPAGERALPKIK |
| | | SGKNPEMTQLRQLKELLDNALNVAHFAKLLTTKTTLDNQDGNFYGEF |
| | | GVLYDELAKIPTLYNKVRDYLSQKPFSTEKYKLNFGNPTLLNGWDLNK |
| | | EKDNFGVILQKDGCYYLALLDKAHKKVFDNAPNTGKNVYQKMVYKL |
| | | LPGPNKMLPKVFFAKSNLDYYNPSAELLDKYAKGTHKKGDNFNLKDC |
| | | HALIDFFKAGINKHPEWQHFGFKFSPTSSYRDLSDFYREVEPQGYQVKF |
| | | VDINADYIDELVEQGKLYLFQIYNKDFSPKAHGKPNLHTLYFKALFSED |
| | | NLADPIYKLNGEAQIFYRKASLDMNETTIHRAGEVLENKNPDNPKKRQ |
| | | FVYDIIKDKRYTQDKFMLHVPITMNFGVQGMTIKEFNKKVNQSIQQYD |
| | | EVNVIGIDRGERHLLYLTVINSKGEILEQRSLNDITTASANGTQVTTPYH |
| | | KILDKREIERLNARVGWGEIETIKELKSGYLSHVVHQINQLMLKYNAIV |
| | | VLEDLNFGFKRGRFKVEKQIYQNFENALIKKLNHLVLKDKADDEIGSY |
| | | KNALQLTNNFTDLKSIGKQTGFLFYVPAWNTSKIDPETGFVDLLKPRYE |
| | | NIAQSQAFFGKFDKICYNTDKGYFEFHIDYAKFTDKAKNSRQKWAICS |
| | | HGDKRYVYDKTANQNKGAAKGINVNDELKSLFARYHINDKQPNLVM |
| | | DICQNNDKEFHKSLMCLLKTLLALRYSNASSDEDFILSPVANDEGVFFN |
| | | SALADDTQPQNADANGAYHIALKGLWLLNELKNSDDLNKVKLAIDNQ |
| | | TWLNFAQNR |
| SEQ | Moraxella | MGIHGVPAALFQDFTHLYPLSKTVRFELKPIGKTLEHIHAKNFLNQDET |
| ID | bovoculi | MADMYQKVKAILDDYHRDFIADMMGEVKLTKLAEFYDVYLKFRKNP |
| NO: | AAXH_00205 | KDDGLQKQLKDLQAVLRKEIVKPIGNGGKYKAGYDRLFGAKLFKDGK |
| 33 | (Mb3Cas12a) | ELGDLAKFVIAQEGESSPKLAHLAHFEKFSTYFTGFHDNRKNMYSDED |
| | | KHTAIAYRLIHENLPRFIDNLQILATIKQKHSALYDQIINELTASGLDVSL |
| | | ASHLDGYHKLLTQEGITAYNTLLGGISGEAGSRKIQGINELINSHHNQH |
| | | CHKSERIAKLRPLHKQILSDGMGVSFLPSKFADDSEVCQAVNEFYRHY |
| | | ADVFAKVQSLFDGFDDYQKDGIYVEYKNLNELSKQAFGDFALLGRVL |
| | | DGYYVDVVNPEFNERFAKAKTDNAKAKLTKEKDKFIKGVHSLASLEQ |
| | | AIEHYTARHDDESVQAGKLGQYFKHGLAGVDNPIQKIHNNHSTIKGFL |
| | | ERERPAGERALPKIKSDKSPEIRQLKELLDNALNVAHFAKLLTTKTTLH |
| | | NQDGNFYGEFGALYDELAKIATLYNKVRDYLSQKPFSTEKYKLNFGNP |
| | | TLLNGWDLNKEKDNFGVILQKDGCYYLALLDKAHKKVFDNAPNTGKS |
| | | VYQKMIYKLLPGPNKMLPKVFFAKSNLDYYNPSAELLDKYAQGTHKK |
| | | GDNFNLKDCHALIDFFKAGINKHPEWQHFGFKFSPTSSYQDLSDFYREV |
| | | EPQGYQVKFVDINADYINELVEQGQLYLFQIYNKDFSPKAHGKPNLHT |
| | | LYFKALFSEDNLVNPIYKLNGEAEIFYRKASLDMNETTIHRAGEVLENK |
| | | NPDNPKKRQFVYDIIKDKRYTQDKFMLHVPITMNFGVQGMTIKEFNKK |
| | | VNQSIQQYDEVNVIGIDRGERHLLYLTVINSKGEILEQRSLNDITTASAN |
| | | GTQMTTPYHKILDKREIERLNARVGWGEIETIKELKSGYLSHVVHQISQ |
| | | LMLKYNAIVVLEDLNFGFKRGRFKVEKQIYQNFENALIKKLNHLVLKD |
| | | KADDEIGSYKNALQLTNNFTDLKSIGKQTGFLFYVPAWNTSKIDPETGF |
| | | VDLLKPRYENIAQSQAFFGKFDKICYNADRGYFEFHIDYAKFNDKAKN |
| | | SRQIWKICSHGDKRYVYDKTANQNKGATIGVNVNDELKSLFTRYHIND |
| | | KQPNLVMDICQNNDKEFHKSLMYLLKTLLALRYSNASSDEDFILSPVA |
| | | NDEGVFFNSALADDTQPQNADANGAYHIALKGLWLLNELKNSDDLNK |
| | | VKLAIDNQTWLNFAQNR |
| SEQ | Thiomicrospira | MGIHGVPAATKTFDSEFFNLYSLQKTVRFELKPVGETASFVEDFKNEGL |
| ID | sp. XS5 | KRVVSEDERRAVDYQKVKEIIDDYHRDFIEESLNYFPEQVSKDALEQAF |
| NO: | (TsCas12a) | HLYQKLKAAKVEEREKALKEWEALQKKLREKVVKCFSDSNKARFSRI |
| 34 | | DKKELIKEDLINWLVAQNREDDIPTVETFNNFTTYFTGFHENRKNIYSK |
| | | DDHATAISFRLIHENLPKFFDNVISFNKLKEGFPELKFDKVKEDLEVDYD |
| | | LKHAFEIEYFVNFVTQAGIDQYNYLLGGKTLEDGTKKQGMNEQINLFK |
| | | QQQTRDKARQIPKLIPLFKQILSERTESQSFIPKQFESDQELFDSLQKLHN |
| | | NCQDKFTVLQQAILGLAEADLKKVFIKTSDLNALSNTIFGNYSVFSDAL |
| | | NLYKESLKTKKAQEAFEKLPAHSIHDLIQYLEQFNSSLDAEKQQSTDTV |
| | | LNYFIKTDELYSRFIKSTSEAFTQVQPLFELEALSSKRRPPESEDEGAKG |
| | | QEGFEQIKRIKAYLDTLMEAVHFAKPLYLVKGRKMIEGLDKDQSFYEA |
| | | FEMAYQELESLIIPIYNKARSYLSRKPFKADKFKINFDNNTLLSGWDAN |
| | | KETANASILFKKDGLYYLGIMPKGKTFLFDYFVSSEDSEKLKQRRQKTA |
| | | EEALAQDGESYFEKIRYKLLPGASKMLPKVFFSNKNIGFYNPSDDILRIR |
| | | NTASHTKNGTPQKGHSKVEFNLNDCHKMIDFFKSSIQKHPEWGSFGFTF |
| | | SDTSDFEDMSAFYREVENQGYVISFDKIKETYIQSQVEQGNLYLFQIYN |
| | | KDFSPYSKGKPNLHTLYWKALFEEANLNNVVAKLNGEAEIFFRRHSIK |
| | | ASDKVVHPANQAIDNKNPHTEKTQSTFEYDLVKDKRYTQDKFFFHVPI |
| | | SLNFKAQGVSKFNDKVNGFLKGNPDVNIIGIDRGERHLLYFTVVNQKG |
| | | EILVQESLNTLMSDKGHVNDYQQKLDKKEQERDAARKSWTTVENIKE |
| | | LKEGYLSHVVHKLAHLIIKYNAIVCLEDLNFGFKRGRFKVEKQVYQKF |
| | | EKALIDKLNYLVFKEKELGEVGHYLTAYQLTAPFESFKKLGKQSGILFY |
| | | VPADYTSKIDPTTGFVNFLDLRYQSVEKAKQLLSDFNAIRFNSVQNYFE |
| | | FEIDYKKLTPKRKVGTQSKWVICTYGDVRYQNRRNQKGHWETEEVNV |
| | | TEKLKALFASDSKTTTVIDYANDDNLIDVILEQDKASFFKELLWLLKLT |
| | | MTLRHSKIKSEDDFILSPVKNEQGEFYDSRKAGEVWPKDADANGAYHI |
| | | ALKGLWNLQQINQWEKGKTLNLAIKNQDWFSFIQEKPYQE |
| SEQ | Butyrivibrio | MGIHGVPAAYYQNLTKKYPVSKTIRNELIPIGKTLENIRKNNILESDVKR |
| ID | sp. NC3005 | KQDYEHVKGIMDEYHKQLINEALDNYMLPSLNQAAEIYLKKHVDVED |
| NO: | (BsCas12a) | REEFKKTQDLLRREVTGRLKEHENYTKIGKKDILDLLEKLPSISEEDYN |
| 35 | | ALESFRNFYTYFTSYNKVRENLYSDEEKSSTVAYRLINENLPKFLDNIKS |
| | | YAFVKAAGVLADCIEEEEQDALFMVETFNMTLTQEGIDMYNYQIGKV |
| | | NSAINLYNQKNHKVEEFKKIPKMKVLYKQILSDREEVFIGEFKDDETLL |
| | | SSIGAYGNVLMTYLKSEKINIFFDALRESEGKNVYVKNDLSKTTMSNIV |
| | | FGSWSAFDELLNQEYDLANENKKKDDKYFEKRQKELKKNKSYTLEQM |
| | | SNLSKEDISPIENYIERISEDIEKICIYNGEFEKIVVNEHDSSRKLSKNIKAV |
| | | KVIKDYLDSIKELEHDIKLINGSGQELEKNLVVYVGQEEALEQLRPVDS |
| | | LYNLTRNYLTKKPFSTEKVKLNFNKSTLLNGWDKNKETDNLGILFFKD |
| | | GKYYLGIMNTTANKAFVNPPAAKTENVFKKVDYKLLPGSNKMLPKVF |
| | | FAKSNIGYYNPSTELYSNYKKGTHKKGPSFSIDDCHNLIDFFKESIKKHE |
| | | DWSKFGFEFSDTADYRDISEFYREVEKQGYKLTFTDIDESYINDLIEKNE |
| | | LYLFQIYNKDFSEYSKGKLNLHTLYFMMLFDQRNLDNVVYKLNGEAE |
| | | VFYRPASIAENELVIHKAGEGIKNKNPNRAKVKETSTFSYDIVKDKRYS |
| | | KYKFTLHIPITMNFGVDEVRRFNDVINNALRTDDNVNVIGIDRGERNLL |
| | | YVVVINSEGKILEQISLNSIINKEYDIETNYHALLDEREDDRNKARKDW |
| | | NTIENIKELKTGYLSQVVNVVAKLVLKYNAIICLEDLNFGFKRGRQKVE |
| | | KQVYQKFEKMLIEKLNYLVIDKSREQVSPEKMGGALNALQLTSKFKSF |
| | | AELGKQSGIIYYVPAYLTSKIDPTTGFVNLFYIKYENIEKAKQFFDGFDFI |
| | | RFNKKDDMFEFSFDYKSFTQKACGIRSKWIVYTNGERIIKYPNPEKNNL |
| | | FDEKVINVTDEIKGLFKQYRIPYENGEDIKEIIISKAEADFYKRLFRLLHQ |
| | | TLQMRNSTSDGTRDYIISPVKNDRGEFFCSEFSEGTMPKDADANGAYNI |
| | | ARKGLWVLEQIRQKDEGEKVNLSMTNAEWLKYAQLHLL |
| SEQ | AacCas12b | MAVKSIKVKLRLDDMPEIRAGLWKLHKEVNAGVRYYTEWLSLLRQEN |
| ID | | LYRRSPNGDGEQECDKTAEECKAELLERLRARQVENGHRGPAGSDDEL |
| NO: | | LQLARQLYELLVPQAIGAKGDAQQIARKFLSPLADKDAVGGLGIAKAG |
| 36 | | NKPRWVRMREAGEPGWEEEKEKAETRKSADRTADVLRALADFGLKPL |
| | | MRVYTDSEMSSVEWKPLRKGQAVRTWDRDMFQQAIERMMSWESWN |
| | | QRVGQEYAKLVEQKNRFEQKNFVGQEHLVHLVNQLQQDMKEASPGL |
| | | ESKEQTAHYVTGRALRGSDKVFEKWGKLAPDAPFDLYDAEIKNVQRR |
| | | NTRRFGSHDLFAKLAEPEYQALWREDASFLTRYAVYNSILRKLNHAKM |
| | | FATFTLPDATAHPIWTRFDKLGGNLHQYTFLFNEFGERRHAIRFHKLLK |
| | | VENGVAREVDDVTVPISMSEQLDNLLPRDPNEPIALYFRDYGAEQHFT |
| | | GEFGGAKIQCRRDQLAHMHRRRGARDVYLNVSVRVQSQSEARGERRP |
| | | PYAAVFRLVGDNHRAFVHFDKLSDYLAEHPDDGKLGSEGLLSGLRVM |
| | | SVDLGLRTSASISVFRVARKDELKPNSKGRVPFFFPIKGNDNLVAVHER |
| | | SQLLKLPGETESKDLRAIREERQRTLRQLRTQLAYLRLLVRCGSEDVGR |
| | | RERSWAKLIEQPVDAANHMTPDWREAFENELQKLKSLHGICSDKEWM |
| | | DAVYESVRRVWRHMGKQVRDWRKDVRSGERPKIRGYAKDVVGGNSI |
| | | EQIEYLERQYKFLKSWSFFGKVSGQVIRAEKGSRFAITLREHIDHAKED |
| | | RLKKLADRIIMEALGYVYALDERGKGKWVAKYPPCQLILLEELSEYQF |
| | | NNDRPPSENNQLMQWSHRGVFQELINQAQVHDLLVGTMYAAFSSRFD |
| | | ARTGAPGIRCRRVPARCTQEHNPEPFPWWLNKFVVEHTLDACPLRADD |
| | | LIPTGEGEIFVSPFSAEEGDFHQIHADLNAAQNLQQRLWSDFDISQIRLR |
| | | CDWGEVDGELVLIPRLTGKRTADSYSNKVFYTNTGVTYYERERGKKR |
| | | RKVFAQEKLSEEEAELLVEADEAREKSVVLMRDPSGIINRGNWTRQKE |
| | | FWSMVNQRIEGYLVKQIRSRVPLQDSACENTGDI |
| SEQ | Cas12 | MKKIDNFVGCYPVSKTLRFKAIPIGKTQENIEKKRLVEEDEVRAK |
| ID | Variant | DYKAVKKLIDRYHREFIEGVLDNVKLDGLEEYYMLFNKSDREES |
| NO: | | DNKKIEIMEERFRRVISKSFKNNEEYKKIFSKKIIEEILPNYIKDEEE |
| 37 | | KELVKGFKGFYTAFVGYAQNRENMYSDEKKSTAISYRIVNENMP |
| | | RFITNIKVFEKAKSILDVDKINEINEYILNNDYYVDDFFNIDFFNYV |
| | | LNQKGIDIYNAIIGGIVTGDGRKIQGLNECINLYNQENKKIRLPQF |
| | | KPLYKQILSESESMSFYIDEIESDDMLIDMLKESLQIDSTINNAIDD |
| | | LKVLFNNIFDYDLSGIFINNGLPITTISNDVYGQWSTISDGWNERY |
| | | DVLSNAKDKESEKYFEKRRKEYKKVKSFSISDLQELGGKDLSICK |
| | | KINEIISEMIDDYKSKIEEIQYLFDIKELEKPLVTDLNKIELIKNSLD |
| | | GLKRIERYVIPFLGTGKEQNRDEVFYGYFIKCIDAIKEIDGVYNKT |
| | | RNYLTKKPYSKDKFKLYFENPQLMGGWDRNKESDYRSTLLRKN |
| | | GKYYVAIIDKSSSNCMMNIEEDENDNYEKINYKLLPGPNKMLPK |
| | | VFFSKKNREYFAPSKEIERIYSTGTFKKDTNFVKKDCENLITFYKD |
| | | SLDRHEDWSKSFDFSFKESSAYRDISEFYRDVEKQGYRVSFDLLS |
| | | SNAVNTLVEEGKLYLFQLYNKDFSEKSHGIPNLHTMYFRSLFDD |
| | | NNKGNIRLNGGAEMFMRRASLNKQDVTVHKANQPIKNKNLLNP |
| | | KKTTTLPYDVYKDKRFTEDQYEVHIPITMNKVPNNPYKINHMVR |
| | | EQLVKDDNPYVIGIDRGERNLIYVVVVDGQGHIVEQLSLNEIINE |
| | | NNGISIRTDYHTLLDAKERERDESRKQWKQIENIKELKEGYISQV |
| | | VHKICELVEKYDAVIALEDLNSGFKNSRVKVEKQVYQKFEKMLI |
| | | TKLNYMVDKKKDYNKPGGVLNGYQLTTQFESFSKMGTQNGIMF |
| | | YIPAWLTSKMDPTTGFVDLLKPKYKNKADAQKFFSQFDSIRYDN |
| | | QEDAFVFKVNYTKFPRTDADYNKEWEIYTNGERIRVFRNPKKNN |
| | | EYDYETVNVSERMKELFDSYDLLYDKGELKETICEMEESKFFEEL |
| | | IKLFRLTLQMRNSISGRTDVDYLISPVKNSNGYFYNSNDYKKEGA |
| | | KYPKDADANGAYNIARKVLWAIEQFKMADEDKLDKTKISIKNQ |
| | | EWLEYAQTHCE |

[0357] Alternatively, the Type V CRISPR/Cas enzyme is a programmable Cas14 nuclease. A Cas14 protein of the present disclosure includes 3 partial RuvC domains (RuvC-I, RuvC-II, and RuvC-III, also referred to herein as subdomains) that are not contiguous with respect to the primary amino acid sequence of the Cas14 protein, but form a RuvC domain once the protein is produced and folds. A naturally occurring Cas14 protein functions as an endonuclease that catalyzes cleavage at a specific sequence in a target nucleic acid. A programmable Cas14 nuclease can be a Cas14a protein, a Cas14b protein, a Cas14c protein, a Cas14d protein, a Cas14e protein, a Cas 14f protein, a Cas14g protein, a Cas14h protein, or a Cas14u protein. In some cases, a suitable Cas14 protein comprises an amino acid sequence having at least 80%, at least 85%, at least 90%, at least 95%, at least 98%, at least 99%, or 100%, amino acid sequence identity to any one of SEQ ID NO: 38-SEQ ID NO: 129.

TABLE 2
Cas14 Protein Sequences

| SEQ | |
|---|---|
| ID | |
| NO | Sequence |
| SEQ | MEVQKTVMKTLSLRILRPLYSQEIEKEIKEEKERRKQAGGTGELDGGFYKKLEKKHSE |
| ID | MFSFDRLNLLLNQLQREIAKVYNHAISELYIATIAQGNKSNKHYISSIVYNRAYGYFYN |
| NO: | AYIALGICSKVEANFRSNELLTQQSALPTAKSDNFPIVLHKQKGAEGEDGGFRISTEGS |
| 38 | DLIFEIPIPFYEYNGENRKEPYKWVKKGGQKPVLKLILSTFRRQRNKGWAKDEGTDAE |
| | IRKVTEGKYQVSQIEINRGKKLGEHQKWFANFSIEQPIYERKPNRSIVGGLDVGIRSPLV |
| | CAINNSFSRYSVDSNDVFKFSKQVFAFRRRLLSKNSLKRKGHGAAHKLEPITEMTEKN |
| | DKFRKKIIERWAKEVTNFFVKNQVGIVQIEDLSTMKDREDHFFNQYLRGFWPYYQMQ |
| | TLIENKLKEYGIEVKRVQAKYTSQLCSNPNCRYWNNYFNFEYRKVNKFPKFKCEKCN |
| | LEISADYNAARNLSTPDIEKFVAKATKGINLPEK |
| SEQ | MEEAKTVSKTLSLRILRPLYSAEIEKEIKEEKERRKQGGKSGELDSGFYKKLEKKHTQ |
| ID | MFGWDKLNLMLSQLQRQIARVFNQSISELYIETVIQGKKSNKHYTSKIVYNRAYSVFY |
| NO: | NAYLALGITSKVEANFRSTELLMQKSSLPTAKSDNFPILLHKQKGVEGEEGGFKISADG |
| 39 | NDLIFEIPIPFYEYDSANKKEPFKWIKKGGQKPTIKLILSTFRRQRNKGWAKDEGTDAEI |
| | RKVIEGKYQVSHIEINRGKKLGDHQKWFVNFTIEQPIYERKLDKNIIGGIDVGIKSPLVC |
| | AVNNSFARYSVDSNDVLKFSKQAFAFRRRLLSKNSLKRSGHGSKNKLDPITRMTEKN |
| | DRFRKKIIERWAKEVTNFFIKNQVGTVQIEDLSTMKDRQDNFFNQYLRGFWPYYQMQ |
| | NLIENKLKEYGIETKRIKARYTSQLCSNPSCRHWNSYFSFDHRKTNNFPKFKCEKCALE |
| | ISADYNAARNISTPDIEKFVAKATKGINLPDKNENVILE |
| SEQ | MAKNTITKTLKLRIVRPYNSAEVEKIVADEKNNREKIALEKNKDKVKEACSKHLKVA |
| ID | AYCTTQVERNACLFCKARKLDDKFYQKLRGQFPDAVFWQEISEIFRQLQKQAAEIYN |
| NO: | QSLIELYYEIFIKGKGIANASSVEHYLSDVCYTRAAELFKNAAIASGLRSKIKSNFRLKE |
| 40 | LKNMKSGLPTTKSDNFPIPLVKQKGGQYTGFEISNHNSDFIIKIPFGRWQVKKEIDKYR |
| | PWEKFDFEQVQKSPKPISLLLSTQRRKRNKGWSKDEGTEAEIKKVMNGDYQTSYIEVK |
| | RGSKIGEKSAWMLNLSIDVPKIDKGVDPSIIGGIDVGVKSPLVCAINNAFSRYSISDNDL |
| | FHFNKKMFARRRILLKKNRHKRAGHGAKNKLKPITILTEKSERFRKKLIERWACEIADF |
| | FIKNKVGTVQMENLESMKRKEDSYFNIRLRGFWPYAEMQNKIEFKLKQYGIEIRKVAP |
| | NNTSKTCSKCGHLNNYFNFEYRKKNKFPHFKCEKCNFKENADYNAALNISNPKLKST |
| | KEEP |
| SEQ | MERQKVPQIRKIVRVVPLRILRPKYSDVIENALKKFKEKGDDTNTNDFWRAIRDRDTE |
| ID | FFRKELNFSEDEINQLERDTLFRVGLDNRVLFSYFDFLQEKLMKDYNKIISKLFINRQSK |
| NO: | SSFENDLTDEEVEELIEKDVTPFYGAYIGKGIKSVIKSNLGGKFIKSVKIDRETKKVTKL |
| 41 | TAINIGLMGLPVAKSDTFPIKIIKTNPDYITFQKSTKENLQKIEDYETGIEYGDLLVQITIP |
| | WFKNENKDFSLIKTKEAIEYYKLNGVGKKDLLNINLVLTTYHIRKKKSWQIDGSSQSL |
| | VREMANGELEEKWKSFFDTFIKKYGDEGKSALVKRRVNKKSRAKGEKGRELNLDERI |
| | KRLYDSIKAKSFPSEINLIPENYKWKLHFSIEIPPMVNDIDSNLYGGIDFGEQNIATLCVK |
| | NIEKDDYDFLTIYGNDLLKHAQASYARRRIMRVQDEYKARGHGKSRKTKAQEDYSER |
| | MQKLRQKITERLVKQISDFFLWRNKFHMAVCSLRYEDLNTLYKGESVKAKRMRQFIN |
| | KQQLFNGIERKLKDYNSEIYVNSRYPHYTSRLCSKCGKLNLYFDFLKFRTKNIIIRKNP |
| | DGSEIKYMPFFICEFCGWKQAGDKNASANIADKDYQDKLNKEKEFCNIRKPKSKKEDI |
| | GEENEEERDYSRRFNRNSFIYNSLKKDNKLNQEKLFDEWKNQLKRKIDGRNKFEPKE |
| | YKDRFSYLFAYYQEIIKNESES |
| SEQ | MVPTELITKTLQLRVIRPLYFEEIEKELAELKEQKEKEFEETNSLLLESKKIDAKSLKKL |
| ID | KRKARSSAAVEFWKIAKEKYPDILTKPEMEFIFSEMQKMMARFYNKSMTNIFIEMNND |
| NO: | EKVNPLSLISKASTEANQVIKCSSISSGLNRKIAGSINKTKFKQVRDGLISLPTARTETFPI |
| 42 | SFYKSTANKDEIPISKINLPSEEEADLTITLPFPFFEIKKEKKGQKAYSYFNIIEKSGRSNN |
| | KIDLLLSTHRRQRRKGWKEEGGTSAEIRRLMEGEFDKEWEIYLGEAEKSEKAKNDLIK |
| | NMTRGKLSKDIKEQLEDIQVKYFSDNNVESWNDLSKEQKQELSKLRKKKVEELKDW |
| | KHVKEILKTRAKIGWVELKRGKRQRDRNKWFVNITITRPPFINKELDDTKFGGIDLGV |
| | KVPFVCAVHGSPARLIIKENEILQFNKMVSARNRQITKDSEQRKGRGKKNKFIKKEIFN |
| | ERNELFRKKIIERWANQIVKFFEDQKCATVQIENLESFDRTSYK |
| SEQ | MKSDTKDKKIIIHQTKTLSLRIVKPQSIPMEEFTDLVRYHQMIIFPVYNNGAIDLYKKLF |
| ID | KAKIQKGNEARAIKYFMNKIVYAPIANTVKNSYIALGYSTKMQSSFSGKRLWDLRFGE |
| NO: | ATPPTIKADFPLPFYNQSGFKVSSENGEFIIGIPFGQYTKKTVSDIEKKTSFAWDKFTLED |
| 43 | TTKKTLIELLLSTKTRKMNEGWKNNEGTEAEIKRVMDGTYQVTSLEILQRDDSWFVN |
| | FNIAYDSLKKQPDRDKIAGIHMGITRPLTAVIYNNKYRALSIYPNTVMHLTQKQLARIK |
| | EQRTNSKYATGGHGRNAKVTGTDTLSEAYRQRRKKIIEDWIASIVKFAINNEIGTIYLE |
| | DISNTNSFFAAREQKLIYLEDISNTNSFLSTYKYPISAISDTLQHKLEEKAIQVIRKKAYY |
| | VNQICSLCGHYNKGFTYQFRRKNKFPKMKCQGCLEATSTEFNAAANVANPDYEKLLI |
| | KHGLLQLKK |
| SEQ | MSTITRQVRLSPTPEQSRLLMAHCQQYISTVNVLVAAFDSEVLTGKVSTKDFRAALPS |
| ID | AVKNQALRDAQSVFKRSVELGCLPVLKKPHCQWNNQNWRVEGDQLILPICKDGKTQ |
| NO: | QERFRCAAVALEGKAGILRIKKKRGKWIADLTVTQEDAPESSGSAIMGVDLGIKVPAV |
| 44 | AHIGGKGTRFFGNGRSQRSMRRRFYARRKTLQKAKKLRAVRKSKGKEARWMKTINH |
| | QLSRQIVNHAHALGVGTIKIEALQGIRKGTTRKSRGAAARKNNRMTNTWSFSQLTLFI |
| | TYKAQRQGITVEQVDPAYTSQDCPACRARNGAQDRTYVCSECGWRGHRDTVGAINIS |
| | RRAGLSGHRRGATGA |
| SEQ | MIAQKTIKIKLNPTKEQIIKLNSIIEEYIKVSNFTAKKIAEIQESFTDSGLTQGTCSECGKE |
| ID | KTYRKYHLLKKDNKLFCITCYKRKYSQFTLQKVEFQNKTGLRNVAKLPKTYYTNAIR |
| NO: | FASDTFSGFDEIIKKKQNRLNSIQNRLNFWKELLYNPSNRNEIKIKVVKYAPKTDTREH |
| 45 | PHYYSEAEIKGRIKRLEKQLKKFKMPKYPEFTSETISLQRELYSWKNPDELKISSITDKN |
| | ESMNYYGKEYLKRYIDLINSQTPQILLEKENNSFYLCFPITKNIEMPKIDDTFEPVGIDW |
| | GITRNIAVVSILDSKTKKPKFVKFYSAGYILGKRKHYKSLRKHFGQKKRQDKINKLGT |
| | KEDRFIDSNIHKLAFLIVKEIRNHSNKPIILMENITDNREEAEKSMRQNILLHSVKSRLQ |
| | NYIAYKALWNNIPTNLVKPEHTSQICNRCGHQDRENRPKGSKLFKCVKCNYMSNADF |
| | NASINIARKFYIGEYEPFYKDNEKMKSGVNSISM |
| SEQ | LKLSEQENITTGVKFKLKLDKETSEGLNDYFDEYGKAINFAIKVIQKELAEDRFAGKVR |
| ID | LDENKKPLLNEDGKKIWDFPNEFCSCGKQVNRYVNGKSLCQECYKNKFTEYGIRKRM |
| NO: | YSAKGRKAEQDINIKNSTNKISKTHFNYAIREAFILDKSIKKQRKERFRRLREMKKKLQ |
| 46 | EFIEIRDGNKILCPKIEKQRVERYIHPSWINKEKKLEDFRGYSMSNVLGKIKILDRNIKRE |
| | EKSLKEKGQINFKARRLMLDKSVKFLNDNKISFTISKNLPKEYELDLPEKEKRLNWLK |
| | EKIKIIKNQKPKYAYLLRKDDNFYLQYTLETEFNLKEDYSGIVGIDRGVSHIAVYTFVH |
| | NNGKNERPLFLNSSEILRLKNLQKERDRFLRRKHNKKRKKSNMRNIEKKIQLILHNYS |
| | KQIVDFAKNKNAFIVFEKLEKPKKNRSKMSKKSQYKLSQFTFKKLSDLVDYKAKREGI |
| | KVLYISPEYTSKECSHCGEKVNTQRPFNGNSSLFKCNKCGVELNADYNASINIAKKGL |
| | NILNSTN |
| SEQ | MEESIITGVKFKLRIDKETTKKLNEYFDEYGKAINFAVKIIQKELADDRFAGKAKLDQN |
| ID | KNPILDENGKKIYEFPDEFCSCGKQVNKYVNNKPFCQECYKIRFTENGIRKRMYSAKG |
| NO: | RKAEHKINILNSTNKISKTHFNYAIREAFILDKSIKKQRKKRNERLRESKKRLQQFIDMR |
| 47 | DGKREICPTIKGQKVDRFIHPSWITKDKKLEDFRGYTLSIINSKIKILDRNIKREEKSLKE |
| | KGQIIFKAKRLMLDKSIRFVGDRKVLFTISKTLPKEYELDLPSKEKRLNWLKEKIEIIKN |
| | QKPKYAYLLRKNIESEKKPNYEYYLQYTLEIKPELKDFYDGAIGIDRGINHIAVCTFISN |
| | DGKVTPPKFFSSGEILRLKNLQKERDRFLLRKHNKNRKKGNMRVIENKINLILHRYSK |
| | QIVDMAKKLNASIVFEELGRIGKSRTKMKKSQRYKLSLFIFKKLSDLVDYKSRREGIRV |
| | TYVPPEYTSKECSHCGEKVNTQRPFNGNYSLFKCNKCGIQLNSDYNASINIAKKGLKIP |
| | NST |
| SEQ | LWTIVIGDFIEMPKQDLVTTGIKFKLDVDKETRKKLDDYFDEYGKAINFAVKIIQKNLK |
| ID | EDRFAGKIALGEDKKPLLDKDGKKIYNYPNESCSCGNQVRRYVNAKPFCVDCYKLKF |
| NO: | TENGIRKRMYSARGRKADSDINIKNSTNKISKTHFNYAIREGFILDKSLKKQRSKRIKKL |
| 48 | LELKRKLQEFIDIRQGQMVLCPKIKNQRVDKFIHPSWLKRDKKLEEFRGYSLSVVEGKI |
| | KIFNRNILREEDSLRQRGHVNFKANRIMLDKSVRFLDGGKVNFNLNKGLPKEYLLDLP |
| | KKENKLSWLNEKISLIKLQKPKYAYLLRREGSFFIQYTIENVPKTFSDYLGAIGIDRGIS |
| | HIAVCTFVSKNGVNKAPVFFSSGEILKLKSLQKQRDLFLRGKHNKIRKKSNMRNIDNKI |
| | NLILHKYSRNIVNLAKSEKAFIVFEKLEKIKKSRFKMSKSLQYKLSQFTFKKLSDLVEY |
| | KAKIEGIKVDYVPPEYTSKECSHCGEKVDTQRPFNGNSSLFKCNKCRVQLNADYNASI |
| | NIAKKSLNISN |
| SEQ | MSKTTISVKLKIIDLSSEKKEFLDNYFNEYAKATTFCQLRIRRLLRNTHWLGKKEKSSK |
| ID | KWIFESGICDLCGENKELVNEDRNSGEPAKICKRCYNGRYGNQMIRKLFVSTKKREVQ |
| NO: | ENMDIRRVAKLNNTHYHRIPEEAFDMIKAADTAEKRRKKNVEYDKKRQMEFIEMFND |
| 49 | EKKRAARPKKPNERETRYVHISKLESPSKGYTLNGIKRKIDGMGKKIERAEKGLSRKKI |
| | FGYQGNRIKLDSNWVRFDLAESEITIPSLFKEMKLRITGPTNVHSKSGQIYFAEWFERIN |
| | KQPNNYCYLIRKTSSNGKYEYYLQYTYEAEVEANKEYAGCLGVDIGCSKLAAAVYY |
| | DSKNKKAQKPIEIFTNPIKKIKMRREKLIKLLSRVKVRHRRRKLMQLSKTEPIIDYTCHK |
| | TARKIVEMANTAKAFISMENLETGIKQKQQARETKKQKFYRNMFLFRKLSKLIEYKAL |
| | LKGIKIVYVKPDYTSQTCSSCGADKEKTERPSQAIFRCLNPTCRYYQRDINADFNAAV |
| | NIAKKALNNTEVVTTLL |
| SEQ | MARAKNQPYQKLTTTTGIKFKLDLSEEEGKRFDEYFSEYAKAVNFCAKVIYQLRKNL |
| ID | KFAGKKELAAKEWKFEISNCDFCNKQKEIYYKNIANGQKVCKGCHRTNFSDNAIRKK |
| NO: | MIPVKGRKVESKFNIHNTTKKISGTHRHWAFEDAADIIESMDKQRKEKQKRLRREKRK |
| 50 | LSYFFELFGDPAKRYELPKVGKQRVPRYLHKIIDKDSLTKKRGYSLSYIKNKIKISERNI |
| | ERDEKSLRKASPIAFGARKIKMSKLDPKRAFDLENNVFKIPGKVIKGQYKFFGTNVAN |
| | EHGKKFYKDRISKILAGKPKYFYLLRKKVAESDGNPIFEYYVQWSIDTETPAITSYDNI |
| | LGIDAGITNLATTVLIPKNLSAEHCSHCGNNHVKPIFTKFFSGKELKAIKIKSRKQKYFL |
| | RGKHNKLVKIKRIRPIEQKVDGYCHVVSKQIVEMAKERNSCIALEKLEKPKKSKFRQR |
| | RREKYAVSMFVFKKLATFIKYKAAREGIEIIPVEPEGTSYTCSHCKNAQNNQRPYFKPN |
| | SKKSWTSMFKCGKCGIELNSDYNAAFNIAQKALNMTSA |
| SEQ | MDEKHFFCSYCNKELKISKNLINKISKGSIREDEAVSKAISIHNKKEHSLILGIKFKLFIE |
| ID | NKLDKKKLNEYFDNYSKAVTFAARIFDKIRSPYKFIGLKDKNTKKWTFPKAKCVFCLE |
| NO: | EKEVAYANEKDNSKICTECYLKEFGENGIRKKIYSTRGRKVEPKYNIFNSTKELSSTHY |
| 51 | NYAIRDAFQLLDALKKQRQKKLKSIFNQKLRLKEFEDIFSDPQKRIELSLKPHQREKRY |
| | IHLSKSGQESINRGYTLRFVRGKIKSLTRNIEREEKSLRKKTPIHFKGNRLMIFPAGIKFD |
| | FASNKVKISISKNLPNEFNFSGTNVKNEHGKSFFKSRIELIKTQKPKYAYVLRKIKREYS |
| | KLRNYEIEKIRLENPNADLCDFYLQYTIETESRNNEEINGIIGIDRGITNLACLVLLKKGD |
| | KKPSGVKFYKGNKILGMKIAYRKHLYLLKGKRNKLRKQRQIRAIEPKINLILHQISKDI |
| | VKIAKEKNFAIALEQLEKPKKARFAQRKKEKYKLALFTFKNLSTLIEYKSKREGIPVIY |
| | VPPEKTSQMCSHCAINGDEHVDTQRPYKKPNAQKPSYSLFKCNKCGIELNADYNAAF |
| | NIAQKGLKTLMLNHSH |
| SEQ | MLQTLLVKLDPSKEQYKMLYETMERFNEACNQIAETVFAIHSANKIEVQKTVYYPIRE |
| ID | KFGLSAQLTILAIRKVCEAYKRDKSIKPEFRLDGALVYDQRVLSWKGLDKVSLVTLQG |
| NO: | RQIIPIKFGDYQKARMDRIRGQADLILVKGVFYLCVVVEVSEESPYDPKGVLGVDLGIK |
| 52 | NLAVDSDGEVHSGEQTTNTRERLDSLKARLQSKGTKSAKRHLKKLSGRMAKFSKDV |
| | NHCISKKLVAKAKGTLMSIALEDLQGIRDRVTVRKAQRRNLHTWNFGLLRMFVDYK |
| | AKIAGVPLVFVDPRNTSRTCPSCGHVAKANRPTRDEFRCVSCGFAGAADHIAAMNIAF |
| | RAEVSQPIVTRFFVQSQAPSFRVG |
| SEQ | MDEEPDSAEPNLAPISVKLKLVKLDGEKLAALNDYFNEYAKAVNFCELKMQKIRKNL |
| ID | VNIRGTYLKEKKAWINQTGECCICKKIDELRCEDKNPDINGKICKKCYNGRYGNQMIR |
| NO: | KLFVSTNKRAVPKSLDIRKVARLHNTHYHRIPPEAADIIKAIETAERKRRNRILFDERRY |
| 53 | NELKDALENEEKRVARPKKPKEREVRYVPISKKDTPSKGYTMNALVRKVSGMAKKIE |
| | RAKRNLNKRKKIEYLGRRILLDKNWVRFDFDKSEISIPTMKEFFGEMRFEITGPSNVMS |
| | PNGREYFTKWFDRIKAQPDNYCYLLRKESEDETDFYLQYTWRPDAHPKKDYTGCLGI |
| | DIGGSKLASAVYFDADKNRAKQPIQIFSNPIGKWKTKRQKVIKVLSKAAVRHKTKKLE |
| | SLRNIEPRIDVHCHRIARKIVGMALAANAFISMENLEGGIREKQKAKETKKQKFSRNM |
| | FVFRKLSKLIEYKALMEGVKVVYIVPDYTSQLCSSCGTNNTKRPKQAIFMCQNTECRY |
| | FGKNINADFNAAINIAKKALNRKDIVRELS |
| SEQ | MEKNNSEQTSITTGIKFKLKLDKETKEKLNNYFDEYGKAINFAVRIIQMQLNDDRLAG |
| ID | KYKRDEKGKPILGEDGKKILEIPNDFCSCGNQVNHYVNGVSFCQECYKKRFSENGIRK |
| NO: | RMYSAKGRKAEQDINIKNSTNKISKTHFNYAIREAFNLDKSIKKQREKRFKKLKDMKR |
| 54 | KLQEFLEIRDGKRVICPKIEKQKVERYIHPSWINKEKKLEEFRGYSLSIVNSKIKSFDRNI |
| | QREEKSLKEKGQINFKAQRLMLDKSVKFLKDNKVSFTISKELPKTFELDLPKKEKKLN |
| | WLNEKLEIIKNQKPKYAYLLRKENNIFLQYTLDSIPEIHSEYSGAVGIDRGVSHIAVYTF |
| | LDKDGKNERPFFLSSSGILRLKNLQKERDKFLRKKHNKIRKKGNMRNIEQKINLILHEY |
| | SKQIVNFAKDKNAFIVFELLEKPKKSRERMSKKIQYKLSQFTFKKLSDLVDYKAKREGI |
| | KVIYVEPAYTSKDCSHCGERVNTQRPFNGNFSLFKCNKCGIVLNSDYNASLNIARKGL |
| | NISAN |
| SEQ | MAEEKFFFCEKCNKDIKIPKNYINKQGAEEKARAKHEHRVHALILGIKFKIYPKKEDIS |
| ID | KLNDYFDEYAKAVTFTAKIVDKLKAPFLFAGKRDKDTSKKKWVFPVDKCSFCKEKTE |
| NO: | INYRTKQGKNICNSCYLTEFGEQGLLEKIYATKGRKVSSSFNLFNSTKKLTGTHNNYV |
| 55 | VKESLQLLDALKKQRSKRLKKLSNTRRKLKQFEEMFEKEDKRFQLPLKEKQRELRFIH |
| | VSQKDRATEFKGYTMNKIKSKIKVLRRNIEREQRSLNRKSPVFFRGTRIRLSPSVQFDD |
| | KDNKIKLTLSKELPKEYSFSGLNVANEHGRKFFAEKLKLIKENKSKYAYLLRRQVNKN |
| | NKKPIYDYYLQYTVEFLPNIITNYNGILGIDRGINTLACIVLLENKKEKPSFVKFFSGKGI |
| | LNLKNKRRKQLYFLKGVHNKYRKQQKIRPIEPRIDQILHDISKQIIDLAKEKRVAISLEQ |
| | LEKPQKPKFRQSRKAKYKLSQFNFKTLSNYIDYKAKKEGIRVIYIAPEMTSQNCSRCA |
| | MKNDLHVNTQRPYKNTSSLFKCNKCGVELNADYNAAFNIAQKGLKILNS |
| SEQ | MISLKLKLLPDEEQKKLLDEMFWKWASICTRVGFGRADKEDLKPPKDAEGVWFSLTQ |
| ID | LNQANTDINDLREAMKHQKHRLEYEKNRLEAQRDDTQDALKNPDRREISTKRKDLFR |
| NO: | PKASVEKGFLKLKYHQERYWVRRLKEINKLIERKTKTLIKIEKGRIKFKATRITLHQGS |
| 56 | FKIRFGDKPAFLIKALSGKNQIDAPFVVVPEQPICGSVVNSKKYLDEITTNFLAYSVNA |
| | MLFGLSRSEEMLLKAKRPEKIKKKEEKLAKKQSAFENKKKELQKLLGRELTQQEEAII |
| | EETRNQFFQDFEVKITKQYSELLSKIANELKQKNDFLKVNKYPILLRKPLKKAKSKKIN |
| | NLSPSEWKYYLQFGVKPLLKQKSRRKSRNVLGIDRGLKHLLAVTVLEPDKKTFVWNK |
| | LYPNPITGWKWRRRKLLRSLKRLKRRIKSQKHETIHENQTRKKLKSLQGRIDDLLHNIS |
| | RKIVETAKEYDAVIVVEDLQSMRQHGRSKGNRLKTLNYALSLFDYANVMQLIKYKA |
| | GIEGIQIYDVKPAGTSQNCAYCLLAQRDSHEYKRSQENSKIGVCLNPNCQNHKKQIDA |
| | DLNAARVIASCYALKINDSQPFGTRKRFKKRTTN |
| SEQ | METLSLKLKLNPSKEQLLVLDKMFWKWASICTRLGLKKAEMSDLEPPKDAEGVWFS |
| ID | KTQLNQANTDVNDLRKAMQHQGKRIEYELDKVENRRNEIQEMLEKPDRRDISPNRKD |
| NO: | LFRPKAAVEKGYLKLKYHKLGYWSKELKTANKLIERKRKTLAKIDAGKMKFKPTRIS |
| 57 | LHTNSFRIKFGEEPKIALSTTSKHEKIELPLITSLQRPLKTSCAKKSKTYLDAAILNFLAY |
| | STNAALFGLSRSEEMLLKAKKPEKIEKRDRKLATKRESFDKKLKTLEKLLERKLSEKE |
| | KSVFKRKQTEFFDKFCITLDETYVEALHRIAEELVSKNKYLEIKKYPVLLRKPESRLRS |
| | KKLKNLKPEDWTYYIQFGFQPLLDTPKPIKTKTVLGIDRGVRHLLAVSIFDPRTKTFTF |
| | NRLYSNPIVDWKWRRRKLLRSIKRLKRRLKSEKHVHLHENQFKAKLRSLEGRIEDHFH |
| | NLSKEIVDLAKENNSVIVVENLGGMRQHGRGRGKWLKALNYALSHFDYAKVMQLIK |
| | YKAELAGVFVYDVAPAGTSINCAYCLLNDKDASNYTRGKVINGKKNTKIGECKTCKK |
| | EFDADLNAARVIALCYEKRLNDPQPFGTRKQFKPKKP |
| SEQ | MKALKLQLIPTRKQYKILDEMFWKWASLANRVSQKGESKETLAPKKDIQKIQFNATQ |
| ID | LNQIEKDIKDLRGAMKEQQKQKERLLLQIQERRSTISEMLNDDNNKERDPHRPLNFRP |
| NO: | KGWRKFHTSKHWVGELSKILRQEDRVKKTIERIVAGKISFKPKRIGIWSSNYKINFFKR |
| 58 | KISINPLNSKGFELTLMTEPTQDLIGKNGGKSVLNNKRYLDDSIKSLLMFALHSRFFGL |
| | NNTDTYLLGGKINPSLVKYYKKNQDMGEFGREIVEKFERKLKQEINEQQKKIIMSQIK |
| | EQYSNRDSAFNKDYLGLINEFSEVFNQRKSERAEYLLDSFEDKIKQIKQEIGESLNISDW |
| | DFLIDEAKKAYGYEEGFTEYVYSKRYLEILNKIVKAVLITDIYFDLRKYPILLRKPLDKI |
| | KKISNLKPDEWSYYIQFGYDSINPVQLMSTDKFLGIDRGLTHLLAYSVFDKEKKEFIIN |
| | QLEPNPIMGWKWKLRKVKRSLQHLERRIRAQKMVKLPENQMKKKLKSIEPKIEVHYH |
| | NISRKIVNLAKDYNASIVVESLEGGGLKQHGRKKNARNRSLNYALSLFDYGKIASLIK |
| | YKADLEGVPMYEVLPAYTSQQCAKCVLEKGSFVDPEIIGYVEDIGIKGSLLDSLFEGTE |
| | LSSIQVLKKIKNKIELSARDNHNKEINLILKYNFKGLVIVRGQDKEEIAEHPIKEINGKFA |
| | ILDFVYKRGKEKVGKKGNQKVRYTGNKKVGYCSKHGQVDADLNASRVIALCKYLDI |
| | NDPILFGEQRKSFK |
| SEQ | MVTRAIKLKLDPTKNQYKLLNEMFWKWASLANRFSQKGASKETLAPKDGTQKIQFN |
| ID | ATQLNQIKKDVDDLRGAMEKQGKQKERLLIQIQERLLTISEILRDDSKKEKDPHRPQNF |
| NO: | RPFGWRRFHTSAYWSSEASKLTRQVDRVRRTIERIKAGKINFKPKRIGLWSSTYKINFL |
| 59 | KKKINISPLKSKSFELDLITEPQQKIIGKEGGKSVANSKKYLDDSIKSLLIFAIKSRLFGLN |
| | NKDKPLFENIITPNLVRYHKKGQEQENFKKEVIKKFENKLKKEISQKQKEIIFSQIERQY |
| | ENRDATFSEDYLRAISEFSEIFNQRKKERAKELLNSFNEKIRQLKKEVNGNISEEDLKIL |
| | EVEAEKAYNYENGFIEWEYSEQFLGVLEKIARAVLISDNYFDLKKYPILIRKPTNKSKK |
| | ITNLKPEEWDYYIQFGYGLINSPMKIETKNFMGIDRGLTHLLAYSIFDRDSEKFTINQLE |
| | LNPIKGWKWKLRKVKRSLQHLERRMRAQKGVKLPENQMKKRLKSIEPKIESYYHNLS |
| | RKIVNLAKANNASIVVESLEGGGLKQHGRKKNSRHRALNYALSLFDYGKIASLIKYKS |
| | DLEGVPMYEVLPAYTSQQCAKCVLKKGSFVEPEIIGYIEEIGFKENLLTLLFEDTGLSSV |
| | QVLKKSKNKMTLSARDKEGKMVDLVLKYNFKGLVISQEKKKEEIVEFPIKEIDGKFAV |
| | LDSAYKRGKERISKKGNQKLVYTGNKKVGYCSVHGQVDADLNASRVIALCKYLGINE |
| | PIVFGEQRKSFK |
| SEQ | LDLITEPIQPHKSSSLRSKEFLEYQISDFLNFSLHSLFFGLASNEGPLVDFKIYDKIVIPKP |
| ID | EERFPKKESEEGKKLDSFDKRVEEYYSDKLEKKIERKLNTEEKNVIDREKTRIWGEVN |
| NO: | KLEEIRSIIDEINEIKKQKHISEKSKLLGEKWKKVNNIQETLLSQEYVSLISNLSDELTNK |
| 60 | KKELLAKKYSKFDDKIKKIKEDYGLEFDENTIKKEGEKAFLNPDKFSKYQFSSSYLKLI |
| | GEIARSLITYKGFLDLNKYPIIFRKPINKVKKIHNLEPDEWKYYIQFGYEQINNPKLETE |
| | NILGIDRGLTHILAYSVFEPRSSKFILNKLEPNPIEGWKWKLRKLRRSIQNLERRWRAQ |
| | DNVKLPENQMKKNLRSIEDKVENLYHNLSRKIVDLAKEKNACIVFEKLEGQGMKQHG |
| | RKKSDRLRGLNYKLSLFDYGKIAKLIKYKAEIEGIPIYRIDSAYTSQNCAKCVLESRRFA |
| | QPEEISCLDDFKEGDNLDKRILEGTGLVEAKIYKKLLKEKKEDFEIEEDIAMFDTKKVI |
| | KENKEKTVILDYVYTRRKEIIGTNHKKNIKGIAKYTGNTKIGYCMKHGQVDADLNAS |
| | RTIALCKNFDINNPEIWK |
| SEQ | MSDESLVSSEDKLAIKIKIVPNAEQAKMLDEMFKKWSSICNRISRGKEDIETLRPDEGK |
| ID | ELQFNSTQLNSATMDVSDLKKAMARQGERLEAEVSKLRGRYETIDASLRDPSRRHTN |
| NO: | PQKPSSFYPSDWDISGRLTPRFHTARHYSTELRKLKAKEDKMLKTINKIKNGKIVFKPK |
| 61 | RITLWPSSVNMAFKGSRLLLKPFANGFEMELPIVISPQKTADGKSQKASAEYMRNALL |
| | GLAGYSINQLLFGMNRSQKMLANAKKPEKVEKFLEQMKNKDANFDKKIKALEGKWL |
| | LDRKLKESEKSSIAVVRTKFFKSGKVELNEDYLKLLKHMANEILERDGFVNLNKYPILS |
| | RKPMKRYKQKNIDNLKPNMWKYYIQFGYEPIFERKASGKPKNIMGIDRGLTHLLAVA |
| | VFSPDQQKFLFNHLESNPIMHWKWKLRKIRRSIQHMERRIRAEKNKHIHEAQLKKRLG |
| | SIEEKTEQHYHIVSSKIINWAIEYEAAIVLESLSHMKQRGGKKSVRTRALNYALSLFDY |
| | EKVARLITYKARIRGIPVYDVLPGMTSKTCATCLLNGSQGAYVRGLETTKAAGKATK |
| | RKNMKIGKCMVCNSSENSMIDADLNAARVIAICKYKNLNDPQPAGSRKVFKRF |
| SEQ | MLALKLKIMPTEKQAEILDAMFWKWASICSRIAKMKKKVSVKENKKELSKKIPSNSDI |
| ID | WFSKTQLCQAEVDVGDHKKALKNFEKRQESLLDELKYKVKAINEVINDESKREIDPN |
| NO: | NPSKFRIKDSTKKGNLNSPKFFTLKKWQKILQENEKRIKKKESTIEKLKRGNIFFNPTKI |
| 62 | SLHEEEYSINFGSSKLLLNCFYKYNKKSGINSDQLENKFNEFQNGLNIICSPLQPIRGSSK |
| | RSFEFIRNSIINFLMYSLYAKLFGIPRSVKALMKSNKDENKLKLEEKLKKKKSSFNKTV |
| | KEFEKMIGRKLSDNESKILNDESKKFFEIIKSNNKYIPSEEYLKLLKDISEEIYNSNIDFKP |
| | YKYSILIRKPLSKFKSKKLYNLKPTDYKYYLQLSYEPFSKQLIATKTILGIDRGLKHLLA |
| | VSVFDPSQNKFVYNKLIKNPVFKWKKRYHDLKRSIRNRERRIRALTGVHIHENQLIKK |
| | LKSMKNKINVLYHNVSKNIVDLAKKYESTIVLERLENLKQHGRSKGKRYKKLNYVLS |
| | NFDYKKIESLISYKAKKEGVPVSNINPKYTSKTCAKCLLEVNQLSELKNEYNRDSKNS |
| | KIGICNIHGQIDADLNAARVIALCYSKNLNEPHFK |
| SEQ | VINLFGYKFALYPNKTQEELLNKHLGECGWLYNKAIEQNEYYKADSNIEEAQKKFELL |
| ID | PDKNSDEAKVLRGNISKDNYVYRTLVKKKKSEINVQIRKAVVLRPAETIRNLAKVKK |
| NO: | KGLSVGRLKFIPIREWDVLPFKQSDQIRLEENYLILEPYGRLKFKMHRPLLGKPKTFCIK |
| 63 | RTATDRWTISFSTEYDDSNMRKNDGGQVGIDVGLKTHLRLSNENPDEDPRYPNPKIW |
| | KRYDRRLTILQRRISKSKKLGKNRTRLRLRLSRLWEKIRNSRADLIQNETYEILSENKLI |
| | AIEDLNVKGMQEKKDKKGRKGRTRAQEKGLHRSISDAAFSEFRRVLEYKAKRFGSEV |
| | KPVSAIDSSKECHNCGNKKGMPLESRIYECPKCGLKIDRDLNSAKVILARATGVRPGS |
| | NARADTKISATAGASVQTEGTVSEDFRQQMETSDQKPMQGEGSKEPPMNPEHKSSGR |
| | GSKHVNIGCKNKVGLYNEDENSRSTEKQIMDENRSTTEDMVEIGALHSPVLTT |
| SEQ | MIASIDYEAVSQALIVFEFKAKGKDSQYQAIDEAIRSYRFIRNSCLRYWMDNKKVGKY |
| ID | DLNKYCKVLAKQYPFANKLNSQARQSAAECSWSAISRFYDNCKRKVSGKKGFPKFK |
| NO: | KHARSVEYKTSGWKLSENRKAITFTDKNGIGKLKLKGTYDLHFSQLEDMKRVRLVRR |
| 64 | ADGYYVQFCISVDVKVETEPTGKAIGLDVGIKYFLADSSGNTIENPQFYRKAEKKLNR |
| | ANRRKSKKYIRGVKPQSKNYHKARCRYARKHLRVSRQRKEYCKRVAYCVIHSNDVV |
| | AYEDLNVKGMVKNRHLAKSISDVAWSTFRHWLEYFAIKYGKLTIPVAPHNTSQNCSN |
| | CDKKVPKSLSTRTHICHHCGYSEDRDVNAAKNILKKALSTVGQTGSLKLGEIEPLLVL |
| | EQSCTRKFDL |
| SEQ | LAEENTLHLTLAMSLPLNDLPENRTRSELWRRQWLPQKKLSLLLGVNQSVRKAAADC |
| ID | LRWFEPYQELLWWEPTDPDGKKLLDKEGRPIKRTAGHMRVLRKLEEIAPFRGYQLGS |
| NO: | AVKNGLRHKVADLLLSYAKRKLDPQFTDKTSYPSIGDQFPIVWTGAFVCYEQSITGQL |
| 65 | YLYLPLFPRGSHQEDITNNYDPDRGPALQVFGEKEIARLSRSTSGLLLPLQFDKWGEAT |
| | FIRGENNPPTWKATHRRSDKKWLSEVLLREKDFQPKRVELLVRNGRIFVNVACEIPTK |
| | PLLEVENFMGVSFGLEHLVTVVVINRDGNVVHQRQEPARRYEKTYFARLERLRRRGG |
| | PFSQELETFHYRQVAQIVEEALRFKSVPAVEQVGNIPKGRYNPRLNLRLSYWPFGKLA |
| | DLTSYKAVKEGLPKPYSVYSATAKMLCSTCGAANKEGDQPISLKGPTVYCGNCGTRH |
| | NTGFNTALNLARRAQELFVKGVVAR |
| SEQ | MSQSLLKWHDMAGRDKDASRSLQKSAVEGVLLHLTASHRVALEMLEKSVSQTVAVT |
| ID | MEAAQQRLVIVLEDDPTKATSRKRVISADLQFTREEFGSLPNWAQKLASTCPEIATKY |
| NO: | ADKHINSIRIAWGVAKESTNGDAVEQKLQWQIRLLDVTMFLQQLVLQLADKALLEQI |
| 66 | PSSIRGGIGQEVAQQVTSHIQLLDSGTVLKAELPTISDRNSELARKQWEDAIQTVCTYA |
| | LPFSRERARILDPGKYAAEDPRGDRLINIDPMWARVLKGPTVKSLPLLFVSGSSIRIVKL |
| | TLPRKHAAGHKHTFTATYLVLPVSREWINSLPGTVQEKVQWWKKPDVLATQELLVG |
| | KGALKKSANTLVIPISAGKKRFFNHILPALQRGFPLQWQRIVGRSYRRPATHRKWFAQ |
| | LTIGYTNPSSLPEMALGIHFGMKDILWWALADKQGNILKDGSIPGNSILDFSLQEKGKI |
| | ERQQKAGKNVAGKKYGKSLLNATYRVVNGVLEFSKGISAEHASQPIGLGLETIRFVDK |
| | ASGSSPVNARHSNWNYGQLSGIFANKAGPAGFSVTEITLKKAQRDLSDAEQARVLAIE |
| | ATKRFASRIKRLATKRKDDTLFV |
| SEQ | VEPVEKERFYYRTYTFRLDGQPRTQNLTTQSGWGLLTKAVLDNTKHYWEIVHHARIA |
| ID | NQPIVFENPVIDEQGNPKLNKLGQPRFWKRPISDIVNQLRALFENQNPYQLGSSLIQGT |
| NO: | YWDVAENLASWYALNKEYLAGTATWGEPSFPEPHPLTEINQWMPLTFSSGKVVRLLK |
| 67 | NASGRYFIGLPILGENNPCYRMRTIEKLIPCDGKGRVTSGSLILFPLVGIYAQQHRRMTD |
| | ICESIRTEKGKLAWAQVSIDYVREVDKRRRMRRTRKSQGWIQGPWQEVFILRLVLAH |
| | KAPKLYKPRCFAGISLGPKTLASCVILDQDERVVEKQQWSGSELLSLIHQGEERLRSLR |
| | EQSKPTWNAAYRKQLKSLINTQVFTIVTFLRERGAAVRLESIARVRKSTPAPPVNFLLS |
| | HWAYRQITERLKDLAIRNGMPLTHSNGSYGVRFTCSQCGATNQGIKDPTKYKVDIESE |
| | TFLCSICSHREIAAVNTATNLAKQLLDE |
| SEQ | MNDTETSETLTSHRTVCAHLHVVGETGSLPRLVEAALAELITLNGRATQALLSLAKNG |
| ID | LVLRRDKEENLIAAELTLPCRKNKYADVAAKAGEPILATRINNKGKLVTKKWYGEGN |
| NO: | SYHIVRFTPETGMFTVRVFDRYAFDEELLHLHSEVVFGSDLPKGIKAKTDSLPANFLQA |
| 68 | VFTSFLELPFQGFPDIVVKPAMKQAAEQLLSYVQLEAGENQQAEYPDTNERDPELRLV |
| | EWQKSLHELSVRTEPFEFVRARDIDYYAETDRRGNRFVNITPEWTKFAESPFARRLPLK |
| | IPPEFCILLRRKTEGHAKIPNRIYLGLQIFDGVTPDSTLGVLATAEDGKLFWWHDHLDE |
| | FSNLEGKPEPKLKNKPQLLMVSLEYDREQRFEESVGGDRKICLVTLKETRNFRRGWN |
| | GRILGIHFQHNPVITWALMDHDAEVLEKGFIEGNAFLGKALDKQALNEYLQKGGKWV |
| | GDRSFGNKLKGITHTLASLIVRLAREKDAWIALEEISWVQKQSADSVANHEIVEQPHH |
| | SLTR |
| SEQ | MNDTETSETLTSHRTVCAHLHVVGETGSLPRLVEAALAELITLNGRATQALLSLAKNG |
| ID | LVLRRDKEENLIAAELTLPCRKNKYADVAAKAGEPILATRINNKGKLVTKKWYGEGN |
| NO: | SYHIVRFTPETGMFTVRVFDRYAFDEELLHLHSEVVFGSDLPKGIKAKTDSLPANFLQA |
| 69 | VFTSFLELPFQGFPDIVVKPAMKQAAEQLLSYVQLEAGENQQAEYPDTNERDPELRLV |
| | EWQKSLHELSVRTEPFEFVRARDIDYYAETDRRGNRFVNITPEWTKFAESPFARRLPLK |
| | IPPEFCILLRRKTEGHAKIPNRIYLGLQIFDGVTPDSTLGVLATAEDGKLFWWHDHLDE |
| | FSNLEGKPEPKLKNKPQLLMVSLEYDREQRFEESVGGDRKICLVTLKETRNFRRGRHG |
| | HTRTDRLPAGNTLWRADFATSAEVAAPKWNGRILGIHFQHNPVITWALMDHDAEVLE |
| | KGFIEGNAFLGKALDKQALNEYLQKGGKWVGDRSFGNKLKGITHTLASLIVRLAREK |
| | DAWIALEEISWVQKQSADSVANRRFSMWNYSRLATLIEWLGTDIATRDCGTAAPLAH |
| | KVSDYLTHFTCPECGACRKAGQKKEIADTVRAGDILTCRKCGFSGPIPDNFIAEFVAKK |
| | ALERMLKKKPV |
| SEQ | MAKRNFGEKSEALYRAVRFEVRPSKEELSILLAVSEVLRMLFNSALAERQQVFTEFIAS |
| ID | LYAELKSASVPEEISEIRKKLREAYKEHSISLFDQINALTARRVEDEAFASVTRNWQEE |
| NO: | TLDALDGAYKSFLSLRRKGDYDAHSPRSRDSGFFQKIPGRSGFKIGEGRIALSCGAGRK |
| 70 | LSFPIPDYQQGRLAETTKLKKFELYRDQPNLAKSGRFWISVVYELPKPEATTCQSEQVA |
| | FVALGASSIGVVSQRGEEVIALWRSDKHWVPKIEAVEERMKRRVKGSRGWLRLLNSG |
| | KRRMHMISSRQHVQDEREIVDYLVRNHGSHFVVTELVVRSKEGKLADSSKPERGGSL |
| | GLNWAAQNTGSLSRLVRQLEEKVKEHGGSVRKHKLTLTEAPPARGAENKLWMARKL |
| | RESFLKEV |
| SEQ | LAKNDEKELLYQSVKFEIYPDESKIRVLTRVSNILVLVWNSALGERRARFELYIAPLYE |
| ID | ELKKFPRKSAESNALRQKIREGYKEHIPTFFDQLKKLLTPMRKEDPALLGSVPRAYQEE |
| NO: | TLNTLNGSFVSFMTLRRNNDMDAKPPKGRAEDRFHEISGRSGFKIDGSEFVLSTKEQK |
| 71 | LRFPIPNYQLEKLKEAKQIKKFTLYQSRDRRFWISIAYEIELPDQRPFNPEEVIYIAFGAS |
| | SIGVISPEGEKVIDFWRPDKHWKPKIKEVENRMRSCKKGSRAWKKRAAARRKMYAM |
| | TQRQQKLNHREIVASLLRLGFHFVVTEYTVRSKPGKLADGSNPKRGGAPQGFNWSAQ |
| | NTGSFGEFILWLKQKVKEQGGTVQTFRLVLGQSERPEKRGRDNKIEMVRLLREKYLES |
| | QTIVV |
| SEQ | MAKGKKKEGKPLYRAVRFEIFPTSDQITLFLRVSKNLQQVWNEAWQERQSCYEQFFG |
| ID | SIYERIGQAKKRAQEAGFSEVWENEAKKGLNKKLRQQEISMQLVSEKESLLQELSIAF |
| NO: | QEHGVTLYDQINGLTARRIIGEFALIPRNWQEETLDSLDGSFKSFLALRKNGDPDAKPP |
| 72 | RQRVSENSFYKIPGRSGFKVSNGQIYLSFGKIGQTLTSVIPEFQLKRLETAIKLKKFELCR |
| | DERDMAKPGRFWISVAYEIPKPEKVPVVSKQITYLAIGASRLGVVSPKGEFCLNLPRSD |
| | YHWKPQINALQERLEGVVKGSRKWKKRMAACTRMFAKLGHQQKQHGQYEVVKKL |
| | LRHGVHFVVTELKVRSKPGALADASKSDRKGSPTGPNWSAQNTGNIARLIQKLTDKA |
| | SEHGGTVIKRNPPLLSLEERQLPDAQRKIFIAKKLREEFLADQK |
| SEQ | MAKREKKDDVVLRGTKMRIYPTDRQVTLMDMWRRRCISLWNLLLNLETAAYGAKN |
| ID | TRSKLGWRSIWARVVEENHAKALIVYQHGKCKKDGSFVLKRDGTVKHPPRERFPGDR |
| NO: | KILLGLFDALRHTLDKGAKCKCNVNQPYALTRAWLDETGHGARTADIIAWLKDFKGE |
| 73 | CDCTAISTAAKYCPAPPTAELLTKIKRAAPADDLPVDQAILLDLFGALRGGLKQKECD |
| | HTHARTVAYFEKHELAGRAEDILAWLIAHGGTCDCKIVEEAANHCPGPRLFIWEHELA |
| | MIMARLKAEPRTEWIGDLPSHAAQTVVKDLVKALQTMLKERAKAAAGDESARKTGF |
| | PKFKKQAYAAGSVYFPNTTMFFDVAAGRVQLPNGCGSMRCEIPRQLVAELLERNLKP |
| | GLVIGAQLGLLGGRIWRQGDRWYLSCQWERPQPTLLPKTGRTAGVKIAASIVFTTYD |
| | NRGQTKEYPMPPADKKLTAVHLVAGKQNSRALEAQKEKEKKLKARKERLRLGKLEK |
| | GHDPNALKPLKRPRVRRSKLFYKSAARLAACEAIERDRRDGFLHRVTNEIVHKFDAVS |
| | VQKMSVAPMMRRQKQKEKQIESKKNEAKKEDNGAAKKPRNLKPVRKLLRHVAMAR |
| | GRQFLEYKYNDLRGPGSVLIADRLEPEVQECSRCGTKNPQMKDGRRLLRCIGVLPDGT |
| | DCDAVLPRNRNAARNAEKRLRKHREAHNA |
| SEQ | MNEVLPIPAVGEDAADTIMRGSKMRIYPSVRQAATMDLWRRRCIQLWNLLLELEQAA |
| ID | YSGENRRTQIGWRSIWATVVEDSHAEAVRVAREGKKRKDGTFRKAPSGKEIPPLDPA |
| NO: | MLAKIQRQMNGAVDVDPKTGEVTPAQPRLFMWEHELQKIMARLKQAPRTHWIDDLP |
| 74 | SHAAQSVVKDLIKALQAMLRERKKRASGIGGRDTGFPKFKKNRYAAGSVYFANTQLR |
| | FEAKRGKAGDPDAVRGEFARVKLPNGVGWMECRMPRHINAAHAYAQATLMGGRIW |
| | RQGENWYLSCQWKMPKPAPLPRAGRTAAIKIAAAIPITTVDNRGQTREYAMPPIDRER |
| | IAAHAAAGRAQSRALEARKRRAKKREAYAKKRHAKKLERGIAAKPPGRARIKLSPGF |
| | YAAAAKLAKLEAEDANAREAWLHEITTQIVRNFDVIAVPRMEVAKLMKKPEPPEEKE |
| | EQVKAPWQGKRRSLKAARVMMRRTAMALIQTTLKYKAVDLRGPQAYEEIAPLDVTA |
| | AACSGCGVLKPEWKMARAKGREIMRCQEPLPGGKTCNTVLTYTRNSARVIGRELAVR |
| | LAERQKA |
| SEQ | MTTQKTYNFCFYDQRFFELSKEAGEVYSRSLEEFWKIYDETGVWLSKFDLQKHMRNK |
| ID | LERKLLHSDSFLGAMQQVHANLASWKQAKKVVPDACPPRKPKFLQAILFKKSQIKYK |
| NO: | NGFLRLTLGTEKEFLYLKWDINIPLPIYGSVTYSKTRGWKINLCLETEVEQKNLSENKY |
| 75 | LSIDLGVKRVATIFDGENTITLSGKKFMGLMHYRNKLNGKTQSRLSHKKKGSNNYKKI |
| | QRAKRKTTDRLLNIQKEMLHKYSSFIVNYAIRNDIGNIIIGDNSSTHDSPNMRGKTNQK |
| | ISQNPEQKLKNYIKYKFESISGRVDIVPEPYTSRKCPHCKNIKKSSPKGRTYKCKKCGFI |
| | FDRDGVGAINIYNENVSFGQIISPGRIRSLTEPIGMKFHNEIYFKSYVAA |
| SEQ | MSVRSFQARVECDKQTMEHLWRTHKVFNERLPEIIKILFKMKRGECGQNDKQKSLYK |
| ID | SISQSILEANAQNADYLLNSVSIKGWKPGTAKKYRNASFTWADDAAKLSSQGIHVYD |
| NO: | KKQVLGDLPGMMSQMVCRQSVEAISGHIELTKKWEKEHNEWLKEKEKWESEDEHK |
| 76 | KYLDLREKFEQFEQSIGGKITKRRGRWHLYLKWLSDNPDFAAWRGNKAVINPLSEKA |
| | QIRINKAKPNKKNSVERDEFFKANPEMKALDNLHGYYERNFVRRRKTKKNPDGFDHK |
| | PTFTLPHPTIHPRWFVFNKPKTNPEGYRKLILPKKAGDLGSLEMRLLTGEKNKGNYPD |
| | DWISVKFKADPRLSLIRPVKGRRVVRKGKEQGQTKETDSYEFFDKHLKKWRPAKLSG |
| | VKLIFPDKTPKAAYLYFTCDIPDEPLTETAKKIQWLETGDVTKKGKKRKKKVLPHGLV |
| | SCAVDLSMRRGTTGFATLCRYENGKIHILRSRNLWVGYKEGKGCHPYRWTEGPDLGH |
| | IAKHKREIRILRSKRGKPVKGEESHIDLQKHIDYMGEDRFKKAARTIVNFALNTENAAS |
| | KNGFYPRADVLLLENLEGLIPDAEKERGINRALAGWNRRHLVERVIEMAKDAGFKRR |
| | VFEIPPYGTSQVCSKCGALGRRYSIIRENNRREIRFGYVEKLFACPNCGYCANADHNAS |
| | VNLNRRFLIEDSFKSYYDWKRLSEKKQKEEIETIESKLMDKLCAMHKISRGSISK |
| SEQ | MHLWRTHCVFNQRLPALLKRLFAMRRGEVGGNEAQRQVYQRVAQFVLARDAKDSV |
| ID | DLLNAVSLRKRSANSAFKKKATISCNGQAREVTGEEVFAEAVALASKGVFAYDKDD |
| NO: | MRAGLPDSLFQPLTRDAVACMRSHEELVATWKKEYREWRDRKSEWEAEPEHALYLN |
| 77 | LRPKFEEGEAARGGRFRKRAERDHAYLDWLEANPQLAAWRRKAPPAVVPIDEAGKR |
| | RIARAKAWKQASVRAEEFWKRNPELHALHKIHVQYLREFVRPRRTRRNKRREGFKQR |
| | PTFTMPDPVRHPRWCLFNAPQTSPQGYRLLRLPQSRRTVGSVELRLLTGPSDGAGFPD |
| | AWVNVRFKADPRLAQLRPVKVPRTVTRGKNKGAKVEADGFRYYDDQLLIERDAQVS |
| | GVKLLFRDIRMAPFADKPIEDRLLSATPYLVFAVEIKDEARTERAKAIRFDETSELTKSG |
| | KKRKTLPAGLVSVAVDLDTRGVGFLTRAVIGVPEIQQTHHGVRLLQSRYVAVGQVEA |
| | RASGEAEWSPGPDLAHIARHKREIRRLRQLRGKPVKGERSHVRLQAHIDRMGEDRFK |
| | KAARKIVNEALRGSNPAAGDPYTRADVLLYESLETLLPDAERERGINRALLRWNRAK |
| | LIEHLKRMCDDAGIRHFPVSPFGTSQVCSKCGALGRRYSLARENGRAVIRFGWVERLF |
| | ACPNPECPGRRPDRPDRPFTCNSDHNASVNLHRVFALGDQAVAAFRALAPRDSPARTL |
| | AVKRVEDTLRPQLMRVHKLADAGVDSPF |
| SEQ | MATLVYRYGVRAHGSARQQDAVVSDPAMLEQLRLGHELRNALVGVQHRYEDGKRA |
| ID | VWSGFASVAAADHRVTTGETAVAELEKQARAEHSADRTAATRQGTAESLKAARAAV |
| NO: | KQARADRKAAMAAVAEQAKPKIQALGDDRDAEIKDLYRRFCQDGVLLPRCGRCAGD |
| 78 | LRSDGDCTDCGAAHEPRKLYWATYNAIREDHQTAVKLVEAKRKAGQPARLRFRRWT |
| | GDGTLTVQLQRMHGPACRCVTCAEKLTRRARKTDPQAPAVAADPAYPPTDPPRDPAL |
| | LASGQGKWRNVLQLGTWIPPGEWSAMSRAERRRVGRSHIGWQLGGGRQLTLPVQLH |
| | RQMPADADVAMAQLTRVRVGGRHRMSVALTAKLPDPPQVQGLPPVALHLGWRQRP |
| | DGSLRVATWACPQPLDLPPAVADVVVSHGGRWGEVIMPARWLADAEVPPRLLGRRD |
| | KAMEPVLEALADWLEAHTEACTARMTPALVRRWRSQGRLAGLTNRWRGQPPTGSA |
| | EILTYLEAWRIQDKLLWERESHLRRRLAARRDDAWRRVASWLARHAGVLVVDDADI |
| | AELRRRDDPADTDPTMPASAAQAARARAALAAPGRLRHLATITATRDGLGVHTVASA |
| | GLTRLHRKCGHQAQPDPRYAASAVVTCPGCGNGYDQDYNAAMLMLDRQQQP |
| SEQ | MSRVELHRAYKFRLYPTPAQVAELAEWERQLRRLYNLAHSQRLAAMQRHVRPKSPG |
| ID | VLKSECLSCGAVAVAEIGTDGKAKKTVKHAVGCSVLECRSCGGSPDAEGRTAHTAAC |
| NO: | SFVDYYRQGREMTQLLEEDDQLARVVCSARQETLRDLEKAWQRWHKMPGFGKPHF |
| 79 | KKRIDSCRIYFSTPKSWAVDLGYLSFTGVASSVGRIKIRQDRVWPGDAKFSSCHVVRD |
| | VDEWYAVFPLTFTKEIEKPKGGAVGINRGAVHAIADSTGRVVDSPKFYARSLGVIRHR |
| | ARLLDRKVPFGRAVKPSPTKYHGLPKADIDAAAARVNASPGRLVYEARARGSIAAAE |
| | AHLAALVLPAPRQTSQLPSEGRNRERARRFLALAHQRVRRQREWFLHNESAHYAQSY |
| | TKIAIEDWSTKEMTSSEPRDAEEMKRVTRARNRSILDVGWYELGRQIAYKSEATGAEF |
| | AKVDPGLRETETHVPEAIVRERDVDVSGMLRGEAGISGTCSRCGGLLRASASGHADA |
| | ECEVCLHVEVGDVNAAVNVLKRAMFPGAAPPSKEKAKVTIGIKGRKKKRAA |
| SEQ | MSRVELHRAYKFRLYPTPVQVAELSEWERQLRRLYNLGHEQRLLTLTRHLRPKSPGV |
| ID | LKGECLSCDSTQVQEVGADGRPKTTVRHAEQCPTLACRSCGALRDAEGRTAHTVACA |
| NO: | FVDYYRQGREMTELLAADDQLARVVCSARQEVLRDLDKAWQRWRKMPGFGKPRFK |
| 80 | RRTDSCRIYFSTPKAWKLEGGHLSFTGAATTVGAIKMRQDRNWPASVQFSSCHVVRD |
| | VDEWYAVFPLTFVAEVARPKGGAVGINRGAVHAIADSTGRVVDSPRYYARALGVIRH |
| | RARLFDRKVPSGHAVKPSPTKYRGLSAIEVDRVARATGFTPGRVVTEALNRGGVAYA |
| | ECALAAIAVLGHGPERPLTSDGRNREKARKFLALAHQRVRRQREWFLHNESAHYART |
| | YSKIAIEDWSTKEMTASEPQGEETRRVTRSRNRSILDVGWYELGRQLAYKTEATGAEF |
| | AQVDPGLKETETNVPKAIADARDVDVSGMLRGEAGISGTCSKCGGLLRAPASGHADA |
| | ECEICLNVEVGDVNAAVNVLKRAMFPGDAPPASGEKPKVSIGIKGRQKKKKAA |
| SEQ | MEAIATGMSPERRVELGILPGSVELKRAYKFRLYPMKVQQAELSEWERQLRRLYNLA |
| ID | HEQRLAALLRYRDWDFQKGACPSCRVAVPGVHTAACDHVDYFRQAREMTQLLEVD |
| NO: | AQLSRVICCARQEVLRDLDKAWQRWRKKLGGRPRFKRRTDSCRIYLSTPKHWEIAGR |
| 81 | YLRLSGLASSVGEIRIEQDRAFPEGALLSSCSIVRDVDEWYACLPLTFTQPIERAPHRSV |
| | GLNRGWHALADSDGRVVDSPKFFERALATVQKRSRDLARKVSGSRNAHKARIKLA |
| | KAHQRVRRQRAAFLHQESAYYSKGFDLVALEDMSVRKMTATAGEAPEMGRGAQRD |
| | LNRGILDVGWYELARQIDYKRLAHGGELLRVDPGQTTPLACVTEEQPARGISSACAVC |
| | GIPLARPASGNARMRCTACGSSQVGDVNAAENVLTRALSSAPSGPKSPKASIKIKGRQ |
| | KRLGTPANRAGEASGGDPPVRGPVEGGTLAYVVEPVSESQSDT |
| SEQ | MTVRTYKYRAYPTPEQAEALTSWLRFASQLYNAALEHRKNAWGRHDAHGRGFRFW |
| ID | DGDAAPRKKSDPPGRWVYRGGGGAHISKNDQGKLLTEFRREHAELLPPGMPALVQH |
| NO: | EVLARLERSMAAFFQRATKGQKAGYPRWRSEHRYDSLTFGLTSPSKERFDPETGESLG |
| 82 | RGKTVGAGTYHNGDLRLTGLGELRILEHRRIPMGAIPKSVIVRRSGKRWFVSIAMEMP |
| | SVEPAASGRPAVGLDMGVVTWGTAFTADTSAAAALVADLRRMATDPSDCRRLEELE |
| | REAAQLSEVLAHCRARGLDPARPRRCPKELTKLYRRSLHRLGELDRACARIRRRLQAA |
| | HDIAEPVPDEAGSAVLIEGSNAGMRHARRVARTQRRVARRTRAGHAHSNRRKKAVQ |
| | AYARAKERERSARGDHRHKVSRALVRQFEEISVEALDIKQLTVAPEHNPDPQPDLPAH |
| | VQRRRNRGELDAAWGAFFAALDYKAADAGGRVARKPAPHTTQECARCGTLVPKPIS |
| | LRVHRCPACGYTAPRTVNSARNVLQRPLEEPGRAGPSGANGRGVPHAVA |
| SEQ | MNCRYRYRIYPTPGQRQSLARLFGCVRVVWNDALFLCRQSEKLPKNSELQKLCITQA |
| ID | KKTEARGWLGQVSAIPLQQSVADLGVAFKNFFQSRSGKRKGKKVNPPRVKRRNNRQ |
| NO: | GARFTRGGFKVKTSKVYLARIGDIKIKWSRPLPSEPSSVTVIKDCAGQYFLSFVVEVKP |
| 83 | EIKPPKNPSIGIDLGLKTFASCSNGEKIDSPDYSRLYRKLKRCQRRLAKRQRGSKRRER |
| | MRVKVAKLNAQIRDKRKDFLHKLSTKVVNENQVIALEDLNVGGMLKNRKLSRAISQ |
| | AGWYEFRSLCEGKAEKHNRDFRVISRWEPTSQVCSECGYRWGKIDLSVRSIVCINCGV |
| | EHDRDDNASVNIEQAGLKVGVGHTHDSKRTGSACKTSNGAVCVEPSTHREYVQLTLF |
| | DW |
| SEQ | MKSRWTFRCYPTPEQEQHLARTFGCVRFVWNWALRARTDAFRAGERIGYPATDKAL |
| ID | TLLKQQPETVWLNEVSSVCLQQALRDLQVAFSNFFDKRAAHPSFKRKEARQSANYTE |
| NO: | RGFSFDHERRILKLAKIGAIKVKWSRKAIPHPSSIRLIRTASGKYFVSLVVETQPAPMPE |
| 84 | TGESVGVDFGVARLATLSNGERISNPKHGAKWQRRLAFYQKRLARATKGSKRRMRIK |
| | RHVARIHEKIGNSRSDTLHKLSTDLVTRFDLICVEDLNLRGMVKNHSLARSLHDASIGS |
| | AIRMIEEKAERYGKNVVKIDRWFPSSKTCSDCGHIVEQLPLNVREWTCPECGTTHDRD |
| | ANAAANILAVGQTVSAHGGTVRRSRAKASERKSQRSANRQGVNRA |
| SEQ | KEPLNIGKTAKAVFKEIDPTSLNRAANYDASIELNCKECKFKPFKNVKRYEFNFYNNW |
| ID | YRCNPNSCLQSTYKAQVRKVEIGYEKLKNEILTQMQYYPWFGRLYQNFFHDERDKM |
| NO: | TSLDEIQVIGVQNKVFFNTVEKAWREIIKKRFKDNKETMETIPELKHAAGHGKRKLSN |
| 85 | KSLLRRRFAFVQKSFKFVDNSDVSYRSFSNNIACVLPSRIGVDLGGVISRNPKREYIPQE |
| | ISFNAFWKQHEGLKKGRNIEIQSVQYKGETVKRIEADTGEDKAWGKNRQRRFTSLILK |
| | LVPKQGGKKVWKYPEKRNEGNYEYFPIPIEFILDSGETSIRFGGDEGEAGKQKHLVIPF |
| | NDSKATPLASQQTLLENSRFNAEVKSCIGLAIYANYFYGYARNYVISSIYHKNSKNGQ |
| | AITAIYLESIAHNYVKAIERQLQNLLLNLRDFSFMESHKKELKKYFGGDLEGTGGAQK |
| | RREKEEKIEKEIEQSYLPRLIRLSLTKMVTKQVEM |
| SEQ | ELIVNENKDPLNIGKTAKAVFKEIDPTSINRAANYDASIELACKECKFKPFNNTKRHDF |
| ID | SFYSNWHRCSPNSCLQSTYRAKIRKTEIGYEKLKNEILNQMQYYPWFGRLYQNFFNDQ |
| NO: | RDKMTSLDEIQVTGVQNKIFFNTVEKAWREIIKKRFRDNKETMRTIPDLKNKSGHGSR |
| 86 | KLSNKSLLRRRFAFAQKSFKLVDNSDVSYRAFSNNVACVLPSKIGVDIGGIINKDLKRE |
| | YIPQEITFNVFWKQHDGLKKGRNIEIHSVQYKGEIVKRIEADTGEDKAWGKNRQRRFT |
| | SLILKITPKQGGKKIWKFPEKKNASDYEYFPIPIEFILDNGDASIKFGGEEGEVGKQKHL |
| | LIPFNDSKATPLSSKQMLLETSRFNAEVKSTIGLALYANYFVSYARNYVIKSTYHKNSK |
| | KGQIVTEIYLESISQNFVRAIQRQLQSLMLNLKDWGFMQTHKKELKKYFGSDLEGSKG |
| | GQKRREKEEKIEKEIEASYLPRLIRLSLTKSVTKAEEM |
| SEQ | PEEKTSKLKPNSINLAANYDANEKFNCKECKFHPFKNKKRYEFNFYNNLHGCKSCTKS |
| ID | TNNPAVKRIEIGYQKLKFEIKNQMEAYPWFGRLRINFYSDEKRKMSELNEMQVTGVK |
| NO: | NKIFFDAIECAWREILKKRFRESKETLITIPKLKNKAGHGARKHRNKKLLIRRRAFMKK |
| 87 | NFHFLDNDSISYRSFANNIACVLPSKVGVDIGGIISPDVGKDIKPVDISLNLMWASKEGI |
| | KSGRKVEIYSTQYDGNMVKKIEAETGEDKSWGKNRKRRQTSLLLSIPKPSKQVQEFDF |
| | KEWPRYKDIEKKVQWRGFPIKIIFDSNHNSIEFGTYQGGKQKVLPIPFNDSKTTPLGSK |
| | MNKLEKLRFNSKIKSRLGSAIAANKFLEAARTYCVDSLYHEVSSANAIGKGKIFIEYYL |
| | EILSQNYIEAAQKQLQRFIESIEQWFVADPFQGRLKQYFKDDLKRAKCFLCANREVQT |
| | TCYAAVKLHKSCAEKVKDKNKELAIKERNNKEDAVIKEVEASNYPRVIRLKLTKTITN |
| | KAM |
| SEQ | SESENKIIEQYYAFLYSFRDKYEKPEFKNRGDIKRKLQNKWEDFLKEQNLKNDKKLSN |
| ID | YIFSNRNFRRSYDREEENEEGIDEKKSKPKRINCFEKEKNLKDQYDKDAINASANKDG |
| NO: | AQKWGCFECIFFPMYKIESGDPNKRIIINKTRFKLFDFYLNLKGCKSCLRSTYHPYRSN |
| 88 | VYIESNYDKLKREIGNFLQQKNIFQRMRKAKVSEGKYLTNLDEYRLSCVAMHFKNRW |
| | LFFDSIQKVLRETIKQRLKQMRESYDEQAKTKRSKGHGRAKYEDQVRMIRRRAYSAQ |
| | AHKLLDNGYITLFDYDDKEINKVCLTAINQEGFDIGGYLNSDIDNVMPPIEISFHLKWK |
| | YNEPILNIESPFSKAKISDYLRKIREDLNLERGKEGKARSKKNVRRKVLASKGEDGYKK |
| | IFTDFFSKWKEELEGNAMERVLSQSSGDIQWSKKKRIHYTTLVLNINLLDKKGVGNLK |
| | YYEIAEKTKILSFDKNENKFWPITIQVLLDGYEIGTEYDEIKQLNEKTSKQFTIYDPNTKI |
| | IKIPFTDSKAVPLGMLGINIATLKTVKKTERDIKVSKIFKGGLNSKIVSKIGKGIYAGYFP |
| | TVDKEILEEVEEDTLDNEFSSKSQRNIFLKSIIKNYDKMLKEQLFDFYSFLVRNDLGVRF |
| | LTDRELQNIEDESFNLEKRFFETDRDRIARWFDNTNTDDGKEKFKKLANEIVDSYKPR |
| | LIRLPVVRVIKRIQPVKQREM |
| SEQ | KYSTRDFSELNEIQVTACKQDEFFKVIQNAWREIIKKRFLENRENFIEKKIFKNKKGRG |
| ID | KRQESDKTIQRNRASVMKNFQLIENEKIILRAPSGHVACVFPVKVGLDIGGFKTDDLEK |
| NO: | NIFPPRTITINVFWKNRDRQRKGRKLEVWGIKARTKLIEKVHKWDKLEEVKKKRLKSL |
| 89 | EQKQEKSLDNWSEVNNDSFYKVQIDELQEKIDKSLKGRTMNKILDNKAKESKEAEGL |
| | YIEWEKDFEGEMLRRIEASTGGEEKWGKRRQRRHTSLLLDIKNNSRGSKEIINFYSYAK |
| | QGKKEKKIEFFPFPLTITLDAEEESPLNIKSIPIEDKNATSKYFSIPFTETRATPLSILGDRV |
| | QKFKTKNISGAIKRNLGSSISSCKIVQNAETSAKSILSLPNVKEDNNMEIFINTMSKNYF |
| | RAMMKQMESFIFEMEPKTLIDPYKEKAIKWFEVAASSRAKRKLKKLSKADIKKSELLL |
| | SNTEEFEKEKQEKLEALEKEIEEFYLPRIVRLQLTKTILETPVM |
| SEQ | KKLQLLGHKILLKEYDPNAVNAAANFETSTAELCGQCKMKPFKNKRRFQYTFGKNY |
| ID | HGCLSCIQNVYYAKKRIVQIAKEELKHQLTDSIASIPYKYTSLFSNTNSIDELYILKQER |
| NO: | AAFFSNTNSIDELYITGIENNIAFKVISAIWDEIIKKRRQRYAESLTDTGTVKANRGHGG |
| 90 | TAYKSNTRQEKIRALQKQTLHMVTNPYISLARYKNNYIVATLPRTIGMHIGAIKDRDP |
| | QKKLSDYAINFNVFWSDDRQLIELSTVQYTGDMVRKIEAETGENNKWGENMKRTKTS |
| | LLLEILTKKTTDELTFKDWAFSTKKEIDSVTKKTYQGFPIGIIFEGNESSVKFGSQNYFPL |
| | PFDAKITPPTAEGFRLDWLRKGSFSSQMKTSYGLAIYSNKVTNAIPAYVIKNMFYKIAR |
| | AENGKQIKAKFLKKYLDIAGNNYVPFIIMQHYRVLDTFEEMPISQPKVIRLSLTKTQHII |
| | IKKDKTDSKM |
| SEQ | NTSNLINLGKKAINISANYDANLEVGCKNCKFLSSNGNFPRQTNVKEGCHSCEKSTYE |
| ID | PSIYLVKIGERKAKYDVLDSLKKFTFQSLKYQSKKSMKSRNKKPKELKEFVIFANKNK |
| NO: | AFDVIQKSYNHLILQIKKEINRMNSKKRKKNHKRRLFRDREKQLNKLRLIESSNLFLPR |
| 91 | ENKGNNHVFTYVAIHSVGRDIGVIGSYDEKLNFETELTYQLYFNDDKRLLYAYKPKQ |
| | NKIIKIKEKLWNLRKEKEPLDLEYEKPLNKSITFSIKNDNLFKVSKDLMLRRAKFNIQG |
| | KEKLSKEERKINRDLIKIKGLVNSMSYGRFDELKKEKNIWSPHIYREVRQKEIKPCLIKN |
| | GDRIEIFEQLKKKMERLRRFREKRQKKISKDLIFAERIAYNFHTKSIKNTSNKINIDQEA |
| | KRGKASYMRKRIGYETFKNKYCEQCLSKGNVYRNVQKGCSCFENPFDWIKKGDENL |
| | LPKKNEDLRVKGAFRDEALEKQIVKIAFNIAKGYEDFYDNLGESTEKDLKLKFKVGTT |
| | INEQESLKL |
| SEQ | TSNPIKLGKKAINISANYDSNLQIGCKNCKFLSYNGNFPRQTNVKEGCHSCEKSTYEPP |
| ID | VYTVRIGERRSKYDVLDSLKKFIFLSLKYRQSKKMKTRSKGIRGLEEFVISANLKKAM |
| NO: | DVIQKSYRHLILNIKNEIVRMNGKKRNKNHKRLLFRDREKQLNKLRLIEGSSFFKPPTV |
| 92 | KGDNSIFTCVAIHNIGRDIGIAGDYFDKLEPKIELTYQLYYEYNPKKESEINKRLLYAYK |
| | PKQNKIIEIKEKLWNLRKEKSPLDLEYEKPLTKSITFLVKRDGVFRISKDLMLRKAKFII |
| | QGKEKLSKEERKINRDLIKIKSNIISLTYGRFDELKKDKTIWSPHIFRDVKQGKITPCIER |
| | KGDRMDIFQQLRKKSERLRENRKKRQKKISKDLIFAERIAYNFHTKSIKNTSNLINIKHE |
| | AKRGKASYMRKRIGNETFRIKYCEQCFPKNNVYKNVQKGCSCFEDPFEYIKKGNEDLI |
| | PNKNQDLKAKGAFRDDALEKQIIKVAFNIAKGYEDFYENLKKTTEKDIRLKFKVGTIIS |
| | EEM |
| SEQ | NNSINLSKKAINISANYDANLQVRCKNCKFLSSNGNFPRQTDVKEGCHSCEKSTYEPP |
| ID | VYDVKIGEIKAKYEVLDSLKKFTFQSLKYQLSKSMKFRSKKIKELKEFVIFAKESKALN |
| NO: | VINRSYKHLILNIKNDINRMNSKKRIKNHKGRLFLDRQKQLSKLKLIEGSSFFVPAKNV |
| 93 | GNKSVFTCVAIHSIGRDIGIAGLYDSFTKPVNEITYQIFFSGERRLLYAYKPKQLKILSIK |
| | ENLWSLKNEKKPLDLLYEKPLGKNLNFNVKGGDLFRVSKDLMIRNAKFNVHGRQRLS |
| | DEERLINRNFIKIKGEVVSLSYGRFEELKKDRKLWSPHIFKDVRQNKIKPCLVMQGQRI |
| | DIFEQLKRKLELLKKIRKSRQKKLSKDLIFGERIAYNFHTKSIKNTSNKINIDSDAKRGR |
| | ASYMRKRIGNETFKLKYCDVCFPKANVYRRVQNGCSCSENPYNYIKKGDKDLLPKKD |
| | EGLAIKGAFRDEKLNKQIIKVAFNIAKGYEDFYDDLKKRTEKDVDLKFKIGTTVLDQK |
| | PMEIFDGIVITWL |
| SEQ | LLTTVVETNNLAKKAINVAANFDANIDRQYYRCTPNLCRFIAQSPRETKEKDAGCSSC |
| ID | TQSTYDPKVYVIKIGKLLAKYEILKSLKRFLFMNRYFKQKKTERAQQKQKIGTELNEM |
| NO: | SIFAKATNAMEVIKRATKHCTYDIIPETKSLQMLKRRRHRVKVRSLLKILKERRMKIKK |
| 94 | IPNTFIEIPKQAKKNKSDYYVAAALKSCGIDVGLCGAYEKNAEVEAEYTYQLYYEYKG |
| | NSSTKRILYCYNNPQKNIREFWEAFYIQGSKSHVNTPGTIRLKMEKFLSPITIESEALDF |
| | RVWNSDLKIRNGQYGFIKKRSLGKEAREIKKGMGDIKRKIGNLTYGKSPSELKSIHVY |
| | RTERENPKKPRAARKKEDNFMEIFEMQRKKDYEVNKKRRKEATDAAKIMDFAEEPIR |
| | HYHTNNLKAVRRIDMNEQVERKKTSVFLKRIMQNGYRGNYCRKCIKAPEGSNRDEN |
| | VLEKNEGCLDCIGSEFIWKKSSKEKKGLWHTNRLLRRIRLQCFTTAKAYENFYNDLFE |
| | KKESSLDIIKLKVSITTKSM |
| SEQ | ASTMNLAKQAINFAANYDSNLEIGCKGCKFMSTWSKKSNPKFYPRQNNQANKCHSCT |
| ID | YSTGEPEVPIIEIGERAAKYKIFTALKKFVFMSVAYKERRRQRFKSKKPKELKELAICSN |
| NO: | REKAMEVIQKSVVHCYGDVKQEIPRIRKIKVLKNHKGRLFYKQKRSKIKIAKLEKGSFF |
| 95 | KTFIPKVHNNGCHSCHEASLNKPILVTTALNTIGADIGLINDYSTIAPTETDISWQVYYE |
| | FIPNGDSEAVKKRLLYFYKPKGALIKSIRDKYFKKGHENAVNTGFFKYQGKIVKGPIKF |
| | VNNELDFARKPDLKSMKIKRAGFAIPSAKRLSKEDREINRESIKIKNKIYSLSYGRKKTL |
| | SDKDIIKHLYRPVRQKGVKPLEYRKAPDGFLEFFYSLKRKERRLRKQKEKRQKDMSEII |
| | DAADEFAWHRHTGSIKKTTNHINFKSEVKRGKVPIMKKRIANDSFNTRHCGKCVKQG |
| | NAINKYYIEKQKNCFDCNSIEFKWEKAALEKKGAFKLNKRLQYIVKACFNVAKAYES |
| | FYEDFRKGEEESLDLKFKIGTTTTLKQYPQNKARAM |
| SEQ | HSHNLMLTKLGKQAINFAANYDANLEIGCKNCKFLSYSPKQANPKKYPRQTDVHEDG |
| ID | NIACHSCMQSTKEPPVYIVPIGERKSKYEILTSLNKFTFLALKYKEKKRQAFRAKKPKE |
| NO: | LQELAIAFNKEKAIKVIDKSIQHLILNIKPEIARIQRQKRLKNRKGKLLYLHKRYAIKMG |
| 96 | LIKNGKYFKVGSPKKDGKKLLVLCALNTIGRDIGIIGNIEENNRSETEITYQLYFDCLDA |
| | NPNELRIKEIEYNRLKSYERKIKRLVYAYKPKQTKILEIRSKFFSKGHENKVNTGSFNFE |
| | NPLNKSISIKVKNSAFDFKIGAPFIMLRNGKFHIPTKKRLSKEEREINRTLSKIKGRVFRL |
| | TYGRNISEQGSKSLHIYRKERQHPKLSLEIRKQPDSFIDEFEKLRLKQNFISKLKKQRQK |
| | KLADLLQFADRIAYNYHTSSLEKTSNFINYKPEVKRGRTSYIKKRIGNEGFEKLYCETCI |
| | KSNDKENAYAVEKEELCFVCKAKPFTWKKTNKDKLGIFKYPSRIKDFIRAAFTVAKSY |
| | NDFYENLKKKDLKNEIFLKFKIGLILSHEKKNHISIAKSVAEDERISGKSIKNILNKSIKL |
| | EKNCYSCFFHKEDM |
| SEQ | SLERVIDKRNLAKKAINIAANFDANINKGFYRCETNQCMFIAQKPRKTNNTGCSSCLQS |
| ID | TYDPVIYVVKVGEMLAKYEILKSLKRFVFMNRSFKQKKTEKAKQKERIGGELNEMSIF |
| NO: | ANAALAMGVIKRAIRHCHVDIRPEINRLSELKKTKHRVAAKSLVKIVKQRKTKWKGIP |
| 97 | NSFIQIPQKARNKDADFYVASALKSGGIDIGLCGTYDKKPHADPRWTYQLYFDTEDES |
| | EKRLLYCYNDPQAKIRDFWKTFYERGNPSMVNSPGTIEFRMEGFFEKMTPISIESKDFD |
| | FRVWNKDLLIRRGLYEIKKRKNLNRKAREIKKAMGSVKRVLANMTYGKSPTDKKSIP |
| | VYRVEREKPKKPRAVRKEENELADKLENYRREDFLIRNRRKREATEIAKIIDAAEPPIR |
| | HYHTNHLRAVKRIDLSKPVARKNTSVFLKRIMQNGYRGNYCKKCIKGNIDPNKDECR |
| | LEDIKKCICCEGTQNIWAKKEKLYTGRINVLNKRIKQMKLECFNVAKAYENFYDNLA |
| | ALKEGDLKVLKLKVSIPALNPEASDPEEDM |
| SEQ | NASINLGKRAINLSANYDSNLVIGCKNCKFLSFNGNFPRQTNVREGCHSCDKSTYAPE |
| ID | VYIVKIGERKAKYDVLDSLKKFTFQSLKYQIKKSMRERSKKPKELLEFVIFANKDKAF |
| NO: | NVIQKSYEHLILNIKQEINRMNGKKRIKNHKKRLFKDREKQLNKLRLIGSSSLFFPREN |
| 98 | KGDKDLFTYVAIHSVGRDIGVAGSYESHIEPISDLTYQLFINNEKRLLYAYKPKQNKIIE |
| | LKENLWNLKKEKKPLDLEFTKPLEKSITFSVKNDKLFKVSKDLMLRQAKFNIQGKEKL |
| | SKEERQINRDFSKIKSNVISLSYGRFEELKKEKNIWSPHIYREVKQKEIKPCIVRKGDRIE |
| | LFEQLKRKMDKLKKFRKERQKKISKDLNFAERIAYNFHTKSIKNTSNKINIDQEAKRG |
| | KASYMRKRIGNESFRKKYCEQCFSVGNVYHNVQNGCSCFDNPIELIKKGDEGLIPKGK |
| | EDRKYKGALRDDNLQMQIIRVAFNIAKGYEDFYNNLKEKTEKDLKLKFKIGTTISTQE |
| | SNNKEM |
| SEQ | SNLIKLGKQAINFAANYDANLEVGCKNCKFLSSTNKYPRQTNVHLDNKMACRSCNQS |
| ID | TMEPAIYIVRIGEKKAKYDIYNSLTKFNFQSLKYKAKRSQRFKPKQPKELQELSIAVRK |
| NO: | EKALDIIQKSIDHLIQDIRPEIPRIKQQKRYKNHVGKLFYLQKRRKNKLNLIGKGSFFKV |
| 99 | FSPKEKKNELLVICALTNIGRDIGLIGNYNTIINPLFEVTYQLYYDYIPKKNNKNVQRRL |
| | LYAYKSKNEKILKLKEAFFKRGHENAVNLGSFSYEKPLEKSLTLKIKNDKDDFQVSPS |
| | LRIRTGRFFVPSKRNLSRQEREINRRLVKIKSKIKNMTYGKFETARDKQSVHIFRLERQ |
| | KEKLPLQFRKDEKEFMEEFQKLKRRTNSLKKLRKSRQKKLADLLQLSEKVVYNNHTG |
| | TLKKTSNFLNFSSSVKRGKTAYIKELLGQEGFETLYCSNCINKGQKTRYNIETKEKCFS |
| | CKDVPFVWKKKSTDKDRKGAFLFPAKLKDVIKATFTVAKAYEDFYDNLKSIDEKKPY |
| | IKFKIGLILAHVRHEHKARAKEEAGQKNIYNKPIKIDKNCKECFFFKEEAM |
| SEQ | NTTRKKFRKRTGFPQSDNIKLAYCSAIVRAANLDADIQKKHNQCNPNLCVGIKSNEQS |
| ID | RKYEHSDRQALLCYACNQSTGAPKVDYIQIGEIGAKYKILQMVNAYDFLSLAYNLTK |
| NO: | LRNGKSRGHQRMSQLDEVVIVADYEKATEVIKRSINHLLDDIRGQLSKLKKRTQNEHI |
| 100 | TEHKQSKIRRKLRKLSRLLKRRRWKWGTIPNPYLKNWVFTKKDPELVTVALLHKLGR |
| | DIGLVNRSKRRSKQKLLPKVGFQLYYKWESPSLNNIKKSKAKKLPKRLLIPYKNVKLF |
| | DNKQKLENAIKSLLESYQKTIKVEFDQFFQNRTEEIIAEEQQTLERGLLKQLEKKKNEF |
| | ASQKKALKEEKKKIKEPRKAKLLMEESRSLGFLMANVSYALFNTTIEDLYKKSNVVSG |
| | CIPQEPVVVFPADIQNKGSLAKILFAPKDGFRIKFSGQHLTIRTAKFKIRGKEIKILTKTK |
| | REILKNIEKLRRVWYREQHYKLKLFGKEVSAKPRFLDKRKTSIERRDPNKLADQTDDR |
| | QAELRNKEYELRHKQHKMAERLDNIDTNAQNLQTLSFWVGEADKPPKLDEKDARGF |
| | GVRTCISAWKWFMEDLLKKQEEDPLLKLKLSIM |
| SEQ | PKKPKFQKRTGFPQPDNLRKEYCLAIVRAANLDADFEKKCTKCEGIKTNKKGNIVKGR |
| ID | TYNSADKDNLLCYACNISTGAPAVDYVFVGALEAKYKILQMVKAYDFHSLAYNLAK |
| NO: | LWKGRGRGHQRMGGLNEVVIVSNNEKALDVIEKSLNHFHDEIRGELSRLKAKFQNEH |
| 101 | LHVHKESKLRRKLRKISRLLKRRRWKWDVIPNSYLRNFTFTKTRPDFISVALLHRVGR |
| | DIGLVTKTKIPKPTDLLPQFGFQIYYTWDEPKLNKLKKSRLRSEPKRLLVPYKKIELYK |
| | NKSVLEEAIRHLAEVYTEDLTICFKDFFETQKRKFVSKEKESLKRELLKELTKLKKDFS |
| | ERKTALKRDRKEIKEPKKAKLLMEESRSLGFLAANTSYALFNLIAADLYTKSKKACST |
| | KLPRQLSTILPLEIKEHKSTTSLAIKPEEGFKIRFSNTHLSIRTPKFKMKGADIKALTKRK |
| | REILKNATKLEKSWYGLKHYKLKLYGKEVAAKPRFLDKRNPSIDRRDPKELMEQIEN |
| | RRNEVKDLEYEIRKGQHQMAKRLDNVDTNAQNLQTKSFWVGEADKPPELDSMEAK |
| | KLGLRTCISAWKWFMKDLVLLQEKSPNLKLKLSLTEM |
| SEQ | KFSKRQEGFLIPDNIDLYKCLAIVRSANLDADVQGHKSCYGVKKNGTYRVKQNGKKG |
| ID | VKEKGRKYVFDLIAFKGNIEKIPHEAIEEKDQGRVIVLGKFNYKLILNIEKNHNDRASL |
| NO: | EIKNKIKKLVQISSLETGEFLSDLLSGKIGIDEVYGIIEPDVFSGKELVCKACQQSTYAPL |
| 102 | VEYMPVGELDAKYKILSAIKGYDFLSLAYNLSRNRANKKRGHQKLGGGELSEVVISA |
| | NYDKALNVIKRSINHYHVEIKPEISKLKKKMQNEPLKVMKQARIRRELHQLSRKVKRL |
| | KWKWGMIPNPELQNIIFEKKEKDFVSYALLHTLGRDIGLFKDTSMLQVPNISDYGFQIY |
| | YSWEDPKLNSIKKIKDLPKRLLIPYKRLDFYIDTILVAKVIKNLIELYRKSYVYETFGEE |
| | YGYAKKAEDILFDWDSINLSEGIEQKIQKIKDEFSDLLYEARESKRQNFVESFENILGLY |
| | DKNFASDRNSYQEKIQSMIIKKQQENIEQKLKREFKEVIERGFEGMDQNKKYYKVLSP |
| | NIKGGLLYTDTNNLGFFRSHLAFMLLSKISDDLYRKNNLVSKGGNKGILDQTPETMLT |
| | LEFGKSNLPNISIKRKFFNIKYNSSWIGIRKPKFSIKGAVIREITKKVRDEQRLIKSLEGV |
| | WHKSTHFKRWGKPRFNLPRHPDREKNNDDNLMESITSRREQIQLLLREKQKQQEKMA |
| | GRLDKIDKEIQNLQTANFQIKQIDKKPALTEKSEGKQSVRNALSAWKWFMEDLIKYQ |
| | KRTPILQLKLAKM |
| SEQ | KFSKRQEGFVIPENIGLYKCLAIVRSANLDADVQGHVSCYGVKKNGTYVLKQNGKKSI |
| ID | REKGRKYASDLVAFKGDIEKIPFEVIEEKKKEQSIVLGKFNYKLVLDVMKGEKDRASL |
| NO: | TMKNKSKKLVQVSSLGTDEFLLTLLNEKFGIEEIYGIIEPEVFSGKKLVCKACQQSTYA |
| 103 | PLVEYMPVGELDSKYKILSAIKGYDFLSLAYNLARHRSNKKRGHQKLGGGELSEVVIS |
| | ANNAKALNVIKRSLNHYYSEIKPEISKLRKKMQNEPLKVGKQARMRRELHQLSRKVK |
| | RLKWKWGKIPNLELQNITFKESDRDFISYALLHTLGRDIGMFNKTEIKMPSNILGYGFQ |
| | IYYDWEEPKLNTIKKSKNTPKRILIPYKKLDFYNDSILVARAIKELVGLFQESYEWEIFG |
| | NEYNYAKEAEVELIKLDEESINGNVEKKLQRIKENFSNLLEKAREKKRQNFIESFESIAR |
| | LYDESFTADRNEYQREIQSFIIEKQKQSIEKKLKNEFKKIVEKKFNEQEQGKKHYRVLN |
| | PTIINEFLPKDKNNLGFLRSKIAFILLSKISDDLYKKSNAVSKGGEKGIIKQQPETILDLEF |
| | SKSKLPSINIKKKLFNIKYTSSWLGIRKPKFNIKGAKIREITRRVRDVQRTLKSAESSWY |
| | ASTHFRRWGFPRFNQPRHPDKEKKSDDRLIESITLLREQIQILLREKQKGQKEMAGRLD |
| | DVDKKIQNLQTANFQIKQTGDKPALTEKSAGKQSFRNALSAWKWFMENLLKYQNKT |
| | PDLKLKIARTVM |
| SEQ | KWIEPNNIDFNKCLAITRSANLDADVQGHKMCYGIKTNGTYKAIGKINKKHNTGIIEK |
| ID | RRTYVYDLIVTKEKNEKIVKKTDFMAIDEEIEFDEKKEKLLKKYIKAEVLGTGELIRKD |
| NO: | LNDGEKFDDLCSIEEPQAFRRSELVCKACNQSTYASDIRYIPIGEIEAKYKILKAIKGYD |
| 104 | FLSLKYNLGRLRDSKKRGHQKMGQGELKEFVICANKEKALDVIKRSLNHYLNEVKDE |
| | ISRLNKKMQNEPLKVNDQARWRRELNQISRRLKRLKWKWGEIPNPELKNLIFKSSRPE |
| | FVSYALIHTLGRDIGLINETELKPNNIQEYGFQIYYKWEDPELNHIKKVKNIPKRFIIPYK |
| | NLDLFGKYTILSRAIEGILKLYSSSFQYKSFKDPNLFAKEGEKKITNEDFELGYDEKIKKI |
| | KDDFKSYKKALLEKKKNTLEDSLNSILSVYEQSLLTEQINNVKKWKEGLLKSKESIHK |
| | QKKIENIEDIISRIEELKNVEGWIRTKERDIVNKEETNLKREIKKELKDSYYEEVRKDFS |
| | DLKKGEESEKKPFREEPKPIVIKDYIKFDVLPGENSALGFFLSHLSFNLFDSIQYELFEKS |
| | RLSSSKHPQIPETILDL |
| SEQ | FRKFVKRSGAPQPDNLNKYKCIAIVRAANLDADIMSNESSNCVMCKGIKMNKRKTAK |
| ID | GAAKTTELGRVYAGQSGNLLCTACTKSTMGPLVDYVPIGRIRAKYTILRAVKEYDFLS |
| NO: | LAYNLARTRVSKKGGRQKMHSLSELVIAAEYEIAWNIIKSSVIHYHQETKEEISGLRKK |
| 105 | LQAEHIHKNKEARIRREMHQISRRIKRLKWKWHMIPNSELHNFLFKQQDPSFVAVALL |
| | HTLGRDIGMINKPKGSAKREFIPEYGFQIYYKWMNPKLNDINKQKYRKMPKRSLIPYK |
| | NLNVFGDRELIENAMHKLLKLYDENLEVKGSKFFKTRVVAISSKESEKLKRDLLWKG |
| | ELAKIKKDFNADKNKMQELFKEVKEPKKANALMKQSRNMGFLLQNISYGALGLLAN |
| | RMYEASAKQSKGDATKQPSIVIPLEMEFGNAFPKLLLRSGKFAMNVSSPWLTIRKPKF |
| | VIKGNKIKNITKLMKDEKAKLKRLETSYHRATHFRPTLRGSIDWDSPYFSSPKQPNTHR |
| | RSPDRLSADITEYRGRLKSVEAELREGQRAMAKKLDSVDMTASNLQTSNFQLEKGED |
| | PRLTEIDEKGRSIRNCISSWKKFMEDLMKAQEANPVIKIKIALKDESSVLSEDSM |
| SEQ | KFHPENLNKSYCLAIVRAANLDADIQGHINCIGIKSNKSDRNYENKLESLQNVELLCKA |
| ID | CTKSTYKPNINSVPVGEKKAKYSILSEIKKYDFNSLVYNLKKYRKGKSRGHQKLNELR |
| NO: | ELVITSEYKKALDVINKSVNHYLVNIKNKMSKLKKILQNEHIHVGTLARIRRERNRISR |
| 106 | KLDHYRKKWKFVPNKILKNYVFKNQSPDFVSVALLHKLGRDIGLITKTAILQKSFPEY |
| | SLQLYYKYDTPKLNYLKKSKFKSLPKRILISYKYPKFDINSNYIEESIDKLLKLYEESPIY |
| | KNNSKIIEFFKKSEDNLIKSENDSLKRGIMKEFEKVTKNFSSKKKKLKEELKLKNEDKN |
| | SKMLAKVSRPIGFLKAYLSYMLFNIISNRIFEFSRKSSGRIPQLPSCIINLGNQFENFKNEL |
| | QDSNIGSKKNYKYFCNLLLKSSGFNISYEEEHLSIKTPNFFINGRKLKEITSEKKKIRKEN |
| | EQLIKQWKKLTFFKPSNLNGKKTSDKIRFKSPNNPDIERKSEDNIVENIAKVKYKLEDL |
| | LSEQRKEFNKLAKKHDGVDVEAQCLQTKSFWIDSNSPIKKSLEKKNEKVSVKKKMKA |
| | IRSCISAWKWFMADLIEAQKETPMIKLKLALM |
| SEQ | TTLVPSHLAGIEVMDETTSRNEDMIQKETSRSNEDENYLGVKNKCGINVHKSGRGSSK |
| ID | HEPNMPPEKSGEGQMPKQDSTEMQQRFDESVTGETQVSAGATASIKTDARANSGPRV |
| NO: | GTARALIVKASNLDRDIKLGCKPCEYIRSELPMGKKNGCNHCEKSSDIASVPKVESGFR |
| 107 | KAKYELVRRFESFAADSISRHLGKEQARTRGKRGKKDKKEQMGKVNLDEIAILKNES |
| | LIEYTENQILDARSNRIKEWLRSLRLRLRTRNKGLKKSKSIRRQLITLRRDYRKWIKPNP |
| | YRPDEDPNENSLRLHTKLGVDIGVQGGDNKRMNSDDYETSFSITWRDTATRKICFTKP |
| | KGLLPRHMKFKLRGYPELILYNEELRIQDSQKFPLVDWERIPIFKLRGVSLGKKKVKAL |
| | NRITEAPRLVVAKRIQVNIESKKKKVLTRYVYNDKSINGRLVKAEDSNKDPLLEFKKQ |
| | AEEINSDAKYYENQEIAKNYLWGCEGLHKNLLEEQTKNPYLAFKYGFLNIV |
| SEQ | LDFKRTCSQELVLLPEIEGLKLSGTQGVTSLAKKLINKAANVDRDESYGCHHCIHTRTS |
| ID | LSKPVKKDCNSCNQSTNHPAVPITLKGYKIAFYELWHRFTSWAVDSISKALHRNKVM |
| NO: | GKVNLDEYAVVDNSHIVCYAVRKCYEKRQRSVRLHKRAYRCRAKHYNKSQPKVGRI |
| 108 | YKKSKRRNARNLKKEAKRYFQPNEITNGSSDALFYKIGVDLGIAKGTPETEVKVDVSI |
| | CFQVYYGDARRVLRVRKMDELQSFHLDYTGKLKLKGIGNKDTFTIAKRNESLKWGST |
| | KYEVSRAHKKFKPFGKKGSVKRKCNDYFRSIASWSCEAASQRAQSNLKNAFPYQKAL |
| | VKCYKNLDYKGVKKNDMWYRLCSNRIFRYSRIAEDIAQYQSDKGKAKFEFVILAQSV |
| | AEYDISAIM |
| SEQ | VFLTDDKRKTALRKIRSAFRKTAEIALVRAQEADSLDRQAKKLTIETVSFGAPGAKNA |
| ID | FIGSLQGYNWNSHRANVPSSGSAKDVFRITELGLGIPQSAHEASIGKSFELVGNVVRYT |
| NO: | ANLLSKGYKKGAVNKGAKQQREIKGKEQLSFDLISNGPISGDKLINGQKDALAWWLI |
| 109 | DKMGFHIGLAMEPLSSPNTYGITLQAFWKRHTAPRRYSRGVIRQWQLPFGRQLAPLIH |
| | NFFRKKGASIPIVLTNASKKLAGKGVLLEQTALVDPKKWWQVKEQVTGPLSNIWERS |
| | VPLVLYTATFTHKHGAAHKRPLTLKVIRISSGSVFLLPLSKVTPGKLVRAWMPDINILR |
| | DGRPDEAAYKGPDLIRARERSFPLAYTCVTQIADEWQKRALESNRDSITPLEAKLVTG |
| | SDLLQIHSTVQQAVEQGIGGRISSPIQELLAKDALQLVLQQLFMTVDLLRIQWQLKQEV |
| | ADGNTSEKAVGWAIRISNIHKDAYKTAIEPCTSALKQAWNPLSGFEERTFQLDASIVRK |
| | RSTAKTPDDELVIVLRQQAAEMTVAVTQSVSKELMELAVRHSATLHLLVGEVASKQL |
| | SRSADKDRGAMDHWKLLSQSM |
| SEQ | EDLLQKALNTATNVAAIERHSCISCLFTESEIDVKYKTPDKIGQNTAGCQSCTFRVGYS |
| ID | GNSHTLPMGNRIALDKLRETIQRYAWHSLLFNVPPAPTSKRVRAISELRVAAGRERLFT |
| NO: | VITFVQTNILSKLQKRYAANWTPKSQERLSRLREEGQHILSLLESGSWQQKEVVREDQ |
| 110 | DLIVCSALTKPGLSIGAFCRPKYLKPAKHALVLRLIFVEQWPGQIWGQSKRTRRMRRR |
| | KDVERVYDISVQAWALKGKETRISECIDTMRRHQQAYIGVLPFLILSGSTVRGKGDCPI |
| | LKEITRMRYCPNNEGLIPLGIFYRGSANKLLRVVKGSSFTLPMWQNIETLPHPEPFSPEG |
| | WTATGALYEKNLAYWSALNEAVDWYTGQILSSGLQYPNQNEFLARLQNVIDSIPRKW |
| | FRPQGLKNLKPNGQEDIVPNEFVIPQNAIRAHHVIEWYHKTNDLVAKTLLGWGSQTTL |
| | NQTRPQGDLRFTYTRYYFREKEVPEV |
| SEQ | VPKKKLMRELAKKAVFEAIFNDPIPGSFGCKRCTLIDGARVTDAIEKKQGAKRCAGCE |
| ID | PCTFHTLYDSVKHALPAATGCDRTAIDTGLWEILTALRSYNWMSFRRNAVSDASQKQ |
| NO: | VWSIEELAIWADKERALRVILSALTHTIGKLKNGFSRDGVWKGGKQLYENLAQKDLA |
| 111 | KGLFANGEIFGKELVEADHDMLAWTIVPNHQFHIGLIRGNWKPAAVEASTAFDARWL |
| | TNGAPLRDTRTHGHRGRRFNRTEKLTVLCIKRDGGVSEEFRQERDYELSVMLLQPKN |
| | KLKPEPKGELNSFEDLHDHWWFLKGDEATALVGLTSDPTVGDFIQLGLYIRNPIKAHG |
| | ETKRRLLICFEPPIKLPLRRAFPSEAFKTWEPTINVFRNGRRDTEAYYDIDRARVFEFPE |
| | TRVSLEHLSKQWEVLRLEPDRENTDPYEAQQNEGAELQVYSLLQEAAQKMAPKVVID |
| | PFGQFPLELFSTFVAQLFNAPLSDTKAKIGKPLDSGFVVESHLHLLEEDFAYRDFVRVT |
| | FMGTEPTFRVIHYSNGEGYWKKTVLKGKNNIRTALIPEGAKAAVDAYKNKRCPLTLE |
| | AAILNEEKDRRLVLGNKALSLLAQTARGNLTILEALAAEVLRPLSGTEGVVHLHACVT |
| | RHSTLTESTETDNM |
| SEQ | VEKLFSERLKRAMWLKNEAGRAPPAETLTLKHKRVSGGHEKVKEELQRVLRSLSGTN |
| ID | QAAWNLGLSGGREPKSSDALKGEKSRVVLETVVFHSGHNRVLYDVIEREDQVHQRSS |
| NO: | IMHMRRKGSNLLRLWGRSGKVRRKMREEVAEIKPVWHKDSRWLAIVEEGRQSVVGI |
| 112 | SSAGLAVFAVQESQCTTAEPKPLEYVVSIWFRGSKALNPQDRYLEFKKLKTTEALRGQ |
| | QYDPIPFSLKRGAGCSLAIRGEGIKFGSRGPIKQFFGSDRSRPSHADYDGKRRLSLFSKY |
| | AGDLADLTEEQWNRTVSAFAEDEVRRATLANIQDFLSISHEKYAERLKKRIESIEEPVS |
| | ASKLEAYLSAIFETFVQQREALASNFLMRLVESVALLISLEEKSPRVEFRVARYLAESK |
| | EGFNRKAM |
| SEQ | VVITQSELYKERLLRVMEIKNDRGRKEPRESQGLVLRFTQVTGGQEKVKQKLWLIFEG |
| ID | FSGTNQASWNFGQPAGGRKPNSGDALKGPKSRVTYETVVFHFGLRLLSAVIERHNLK |
| NO: | QQRQTMAYMKRRAAARKKWARSGKKCSRMRNEVEKIKPKWHKDPRWFDIVKEGEP |
| 113 | SIVGISSAGFAIYIVEEPNFPRQDPLEIEYAISIWFRRDRSQYLTFKKIQKAEKLKELQYN |
| | PIPFRLKQEKTSLVFESGDIKFGSRGSIEHFRDEARGKPPKADMDNNRRLTMFSVFSGN |
| | LTNLTEEQYARPVSGLLAPDEKRMPTLLKKLQDFFTPIHEKYGERIKQRLANSEASKRP |
| | FKKLEEYLPAIYLEFRARREGLASNWVLVLINSVRTLVRIKSEDPYIEFKVSQYLLEKE |
| | DNKAL |
| SEQ | KQDALFEERLKKAIFIKRQADPLQREELSLLPPNRKIVTGGHESAKDTLKQILRAINGTN |
| ID | QASWNPGTPSGKRDSKSADALAGPKSRVKLETVVFHVGHRLLKKVVEYQGHQKQQH |
| NO: | GLKAFMRTCAAMRKKWKRSGKVVGELREQLANIQPKWHYDSRPLNLCFEGKPSVVG |
| 114 | LRSAGIALYTIQKSVVPVKEPKPIEYAVSIWFRGPKAMDREDRCLEFKKLKIATELRKL |
| | QFEPIVSTLTQGIKGFSLYIQGNSVKFGSRGPIKYFSNESVRQRPPKADPDGNKRLALFS |
| | KFSGDLSDLTEEQWNRPILAFEGIIRRATLGNIQDYLTVGHEQFAISLEQLLSEKESVLQ |
| | MSIEQQRLKKNLGKKAENEWVESFGAEQARKKAQGIREYISGFFQEYCSQREQWAEN |
| | WVQQLNKSVRLFLTIQDSTPFIEFRVARYLPKGEKKKGKAM |
| SEQ | ANHAERHKRLRKEANRAANRNRPLVADCDTGDPLVGICRLLRRGDKMQPNKTGCRS |
| ID | CEQVEPELRDAILVSGPGRLDNYKYELFQRGRAMAVHRLLKRVPKLNRPKKAAGNDE |
| NO: | KKAENKKSEIQKEKQKQRRMMPAVSMKQVSVADFKHVIENTVRHLFGDRRDREIAE |
| 115 | CAALRAASKYFLKSRRVRPRKLPKLANPDHGKELKGLRLREKRAKLKKEKEKQAELA |
| | RSNQKGAVLHVATLKKDAPPMPYEKTQGRNDYTTFVISAAIKVGATRGTKPLLTPQP |
| | REWQCSLYWRDGQRWIRGGLLGLQAGIVLGPKLNRELLEAVLQRPIECRMSGCGNPL |
| | QVRGAAVDFFMTTNPFYVSGAAYAQKKFKPFGTKRASEDGAAAKAREKLMTQLAK |
| | VLDKVVTQAAHSPLDGIWETRPEAKLRAMIMALEHEWIFLRPGPCHNAAEEVIKCDC |
| | TGGHAILWALIDEARGALEHKEFYAVTRAHTHDCEKQKLGGRLAGFLDLLIAQDVPL |
| | DDAPAARKIKTLLEATPPAPCYKAATSIATCDCEGKFDKLWAIIDATRAGHGTEDLWA |
| | RTLAYPQNVNCKCKAGKDLTHRLADFLGLLIKRDGPFRERPPHKVTGDRKLVFSGDK |
| | KCKGHQYVILAKAHNEEVVRAWISRWGLKSRTNKAGYAATELNLLLNWLSICRRRW |
| | MDMLTVQRDTPYIRMKTGRLVVDDKKERKAM |
| SEQ | AKQREALRVALERGIVRASNRTYTLVTNCTKGGPLPEQCRMIERGKARAMKWEPKLV |
| ID | GCGSCAAATVDLPAIEEYAQPGRLDVAKYKLTTQILAMATRRMMVRAAKLSRRKGQ |
| NO: | WPAKVQEEKEEPPEPKKMLKAVEMRPVAIVDFNRVIQTTIEHLWAERANADEAELKA |
| 116 | LKAAAAYFGPSLKIRARGPPKAAIGRELKKAHRKKAYAERKKARRKRAELARSQARG |
| | AAAHAAIRERDIPPMAYERTQGRNDVTTIPIAAAIKIAATRGARPLPAPKPMKWQCSL |
| | YWNEGQRWIRGGMLTAQAYAHAANIHRPMRCEMWGVGNPLKVRAFEGRVADPDG |
| | AKGRKAEFRLQTNAFYVSGAAYRNKKFKPFGTDRGGIGSARKKRERLMAQLAKILDK |
| | VVSQAAHSPLDDIWHTRPAQKLRAMIKQLEHEWMFLRPQAPTVEGTKPDVDVAGNM |
| | QRQIKALMAPDLPPIEKGSPAKRFTGDKRKKGERAVRVAEAHSDEVVTAWISRWGIQ |
| | TRRNEGSYAAQELELLLNWLQICRRRWLDMTAAQRVSPYIRMKSGRMITDAADEGV |
| | APIPLVENM |
| SEQ | KSISGRSIKHMACLKDMLKSEITEIEEKQKKESLRKWDYYSKFSDEILFRRNLNVSANH |
| ID | DANACYGCNPCAFLKEVYGFRIERRNNERIISYRRGLAGCKSCVQSTGYPPIEFVRRKF |
| NO: | GADKAMEIVREVLHRRNWGALARNIGREKEADPILGELNELLLVDARPYFGNKSAAN |
| 117 | ETNLAFNVITRAAKKFRDEGMYDIHKQLDIHSEEGKVPKGRKSRLIRIERKHKAIHGLD |
| | PGETWRYPHCGKGEKYGVWLNRSRLIHIKGNEYRCLTAFGTTGRRMSLDVACSVLGH |
| | PLVKKKRKKGKKTVDGTELWQIKKATETLPEDPIDCTFYLYAAKPTKDPFILKVGSLK |
| | APRWKKLHKDFFEYSDTEKTQGQEKGKRVVRRGKVPRILSLRPDAKFKVSIWDDPYN |
| | GKNKEGTLLRMELSGLDGAKKPLILKRYGEPNTKPKNFVFWRPHITPHPLTFTPKHDF |
| | GDPNKKTKRRRVFNREYYGHLNDLAKMEPNAKFFEDREVSNKKNPKAKNIRIQAKES |
| | LPNIVAKNGRWAAFDPNDSLWKLYLHWRGRRKTIKGGISQEFQEFKERLDLYKKHED |
| | ESEWKEKEKLWENHEKEWKKTLEIHGSIAEVSQRCVMQSMMGPLDGLVQKKDYVHI |
| | GQSSLKAADDAWTFSANRYKKATGPKWGKISVSNLLYDANQANAELISQSISKYLSK |
| | QKDNQGCEGRKMKFLIKIIEPLRENFVKHTRWLHEMTQKDCEVRAQFSRVSM |
| SEQ | FPSDVGADALKHVRMLQPRLTDEVRKVALTRAPSDRPALARFAAVAQDGLAFVRHL |
| ID | NVSANHDSNCTFPRDPRDPRRGPCEPNPCAFLREVWGFRIVARGNERALSYRRGLAGC |
| NO: | KSCVQSTGFPSVPFHRIGADDCMRKLHEILKARNWRLLARNIGREREADPLLTELSEYL |
| 118 | LVDARTYPDGAAPNSGRLAENVIKRAAKKFRDEGMRDIHAQLRVHSREGKVPKGRL |
| | QRLRRIERKHRAIHALDPGPSWEAEGSARAEVQGVAVYRSQLLRVGHHTQQIEPVGIV |
| | ARTLFGVGRTDLDVAVSVLGAPLTKRKKGSKTLESTEDFRIAKARETRAEDKIEVAFV |
| | LYPTASLLRDEIPKDAFPAMRIDRFLLKVGSVQADREILLQDDYYRFGDAEVKAGKNK |
| | GRTVTRPVKVPRLQALRPDAKFRVNVWADPFGAGDSPGTLLRLEVSGVTRRSQPLRL |
| | LRYGQPSTQPANFLCWRPHRVPDPMTFTPRQKFGERRKNRRTRRPRVFERLYQVHIKH |
| | LAHLEPNRKWFEEARVSAQKWAKARAIRRKGAEDIPVVAPPAKRRWAALQPNAELW |
| | DLYAHDREARKRFRGGRAAEGEEFKPRLNLYLAHEPEAEWESKRDRWERYEKKWTA |
| | VLEEHSRMCAVADRTLPQFLSDPLGARMDDKDYAFVGKSALAVAEAFVEEGTVERA |
| | QGNCSITAKKKFASNASRKRLSVANLLDVSDKADRALVFQAVRQYVQRQAENGGVE |
| | GRRMAFLRKLLAPLRQNFVCHTRWLHM |
| SEQ | AARKKKRGKIGITVKAKEKSPPAAGPFMARKLVNVAANVDGVEVHLCVECEADAHG |
| ID | SASARLLGGCRSCTGSIGAEGRLMGSVDVDRERVIAEPVHTETERLGPDVKAFEAGTA |
| NO: | ESKYAIQRGLEYWGVDLISRNRARTVRKMEEADRPESSTMEKTSWDEIAIKTYSQAYH |
| 119 | ASENHLFWERQRRVRQHALALFRRARERNRGESPLQSTQRPAPLVLAALHAEAAAIS |
| | GRARAEYVLRGPSANVRAAAADIDAKPLGHYKTPSPKVARGFPVKRDLLRARHRIVG |
| | LSRAYFKPSDVVRGTSDAIAHVAGRNIGVAGGKPKEIEKTFTLPFVAYWEDVDRVVH |
| | CSSFKADGPWVRDQRIKIRGVSSAVGTFSLYGLDVAWSKPTSFYIRCSDIRKKFHPKGF |
| | GPMKHWRQWAKELDRLTEQRASCVVRALQDDEELLQTMERGQRYYDVFSCAATHA |
| | TRGEADPSGGCSRCELVSCGVAHKVTKKAKGDTGIEAVAVAGCSLCESKLVGPSKPR |
| | VHRQMAALRQSHALNYLRRLQREWEALEAVQAPTPYLRFKYARHLEVRSM |
| SEQ | AAKKKKQRGKIGISVKPKEGSAPPADGPFMARKLVNVAANVDGVEVNLCIECEADAH |
| ID | GSAPARLLGGCKSCTGSIGAEGRLMGSVDVDRADAIAKPVNTETEKLGPDVQAFEAG |
| NO: | TAETKYALQRGLEYWGVDLISRNRSRTVRRTEEGQPESATMEKTSWDEIAIKSYTRAY |
| 120 | HASENHLFWERQRRVRQHALALFKRAKERNRGDSTLPREPGHGLVAIAALACEAYAV |
| | GGRNLAETVVRGPTFGTARAVRDVEIASLGRYKTPSPKVAHGSPVKRDFLRARHRIVG |
| | LARAYYRPSDVVRGTSDAIAHVAGRNIGVAGGKPRAVEAVFTLPFVAYWEDVDRVV |
| | HCSSFQVSAPWNRDQRMKIAGVTTAAGTFSLHGGELKWAKPTSFYIRCSDTRRKFRP |
| | KGFGPMKRWRQWAKDLDRLVEQRASCVVRALQDDAALLETMERGQRYYDVFACA |
| | VTHATRGEADRLAGCSRCALTPCQEAHRVTTKPRGDAGVEQVQTSDCSLCEGKLVGP |
| | SKPRLHRTLTLLRQEHGLNYLRRLQREWESLEAVQVPTPYLRFKYARHLEVRSM |
| SEQ | TDSQSESVPEVVYALTGGEVPGRVPPDGGSAEGARNAPTGLRKQRGKIKISAKPSKPG |
| ID | SPASSLARTLVNEAANVDGVQSSGCATCRMRANGSAPRALPIGCVACASSIGRAPQEE |
| NO: | TVCALPTTQGPDVRLLEGGHALRKYDIQRALEYWGVDLIGRNLDRQAGRGMEPAEG |
| 121 | ATATMKRVSMDELAVLDFGKSYYASEQHLFAARQRRVRQHAKALKIRAKHANRSGS |
| | VKRALDRSRKQVTALAREFFKPSDVVRGDSDALAHVVGRNLGVSRHPAREIPQTFTLP |
| | LCAYWEDVDRVISCSSLLAGEPFARDQEIRIEGVSSALGSLRLYRGAIEWHKPTSLYIR |
| | CSDTRRKFRPRGGLKKRWRQWAKDLDRLVEQRACCIVRSLQADVELLQTMERAQRF |
| | YDVHDCAATHVGPVAVRCSPCAGKQFDWDRYRLLAALRQEHALNYLRRLQREWES |
| | LEAQQVKMPYLRFKYARKLEVSGPLIGLEVRREPSMGTAIAEM |
| SEQ | AGTAGRRHGSLGARRSINIAGVTDRHGRWGCESCVYTRDQAGNRARCAPCDQSTYA |
| ID | PDVQEVTIGQRQAKYTIFLTLQSFSWTNTMRNNKRAAAGRSKRTTGKRIGQLAEIKIT |
| NO: | GVGLAHAHNVIQRSLQHNITKMWRAEKGKSKRVARLKKAKQLTKRRAYFRRRMSR |
| 122 | QSRGNGFFRTGKGGIHAVAPVKIGLDVGMIASGSSEPADEQTVTLDAIWKGRKKKIRL |
| | IGAKGELAVAACRFREQQTKGDKCIPLILQDGEVRWNQNNWQCHPKKLVPLCGLEVS |
| | RKFVSQADRLAQNKVASPLAARFDKTSVKGTLVESDFAAVLVNVTSIYQQCHAMLLR |
| | SQEPTPSLRVQRTITSM |
| SEQ | GVRFSPAQSQVFFRTVIPQSVEARFAINMAAIHDAAGAFGCSVCRFEDRTPRNAKAVH |
| ID | GCSPCTRSTNRPDVFVLPVGAIKAKYDVFMRLLGFNWTHLNRRQAKRVTVRDRIGQL |
| NO: | DELAISMLTGKAKAVLKKSICHNVDKSFKAMRGSLKKLHRKASKTGKSQLRAKLSDL |
| 123 | RERTNTTQEGSHVEGDSDVALNKIGLDVGLVGKPDYPSEESVEVVVCLYFVGKVLILD |
| | AQGRIRDMRAKQYDGFKIPIIQRGQLTVLSVKDLGKWSLVRQDYVLAGDLRFEPKISK |
| | DRKYAECVKRIALITLQASLGFKERIPYYVTKQVEIKNASHIAFVTEAIQNCAENFREM |
| | TEYLMKYQEKSPDLKVLLTQLM |
| SEQ | RAVVGKVFLEQARRALNLATNFGTNHRTGCNGCYVTPGKLSIPQDGEKNAAGCTSCL |
| ID | MKATASYVSYPKPLGEKVAKYSTLDALKGFPWYSLRLNLRPNYRGKPINGVQEVAPV |
| NO: | SKFRLAEEVIQAVQRYHFTELEQSFPGGRRRLRELRAFYTKEYRRAPEQRQHVVNGDR |
| 124 | NIVVVTVLHELGFSVGMFNEVELLPKTPIECAVNVFIRGNRVLLEVRKPQFDKERLLVE |
| | SLWKKDSRRHTAKWTPPNNEGRIFTAEGWKDFQLPLLLGSTSRSLRAIEKEGFVQLAP |
| | GRDPDYNNTIDEQHSGRPFLPLYLYLQGTISQEYCVFAGTWVIPFQDGISPYSTKDTFQ |
| | PDLKRKAYSLLLDAVKHRLGNKVASGLQYGRFPAIEELKRLVRMHGATRKIPRGEKD |
| | LLKKGDPDTPEWWLLEQYPEFWRLCDAAAKRVSQNVGLLLSLKKQPLWQRRWLESR |
| | TRNEPLDNLPLSMALTLHLTNEEAL |
| SEQ | AAVYSKFYIENHFKMGIPETLSRIRGPSIIQGFSVNENYINIAGVGDRDFIFGCKKCKYT |
| ID | RGKPSSKKINKCHPCKRSTYPEPVIDVRGSISEFKYKIYNKLKQEPNQSIKQNTKGRMN |
| NO: | PSDHTSSNDGIIINGIDNRIAYNVIFSSYKHLMEKQINLLRDTTKRKARQIKKYNNSGKK |
| 125 | KHSLRSQTKGNLKNRYHMLGMFKKGSLTITNEGDFITAVRKVGLDISLYKNESLNKQE |
| | VETELCLNIKWGRTKSYTVSGYIPLPINIDWKLYLFEKETGLTLRLFGNKYKIQSKKFLI |
| | AQLFKPKRPPCADPVVKKAQKWSALNAHVQQMAGLFSDSHLLKRELKNRMHKQLD |
| | FKSLWVGTEDYIKWFEELSRSYVEGAEKSLEFFRQDYFCFNYTKQTTM |
| SEQ | PQQQRDLMLMAANYDQDYGNGCGPCTVVASAAYRPDPQAQHGCKRHLRTLGASAV |
| ID | THVGLGDRTATITALHRLRGPAALAARARAAQAASAPMTPDTDAPDDRRRLEAIDAD |
| NO: | DVVLVGAHRALWSAVRRWADDRRAALRRRLHSEREWLLKDQIRWAELYTLIEASGT |
| 126 | PPQGRWRNTLGALRGQSRWRRVLAPTMRATCAETHAELWDALAELVPEMAKDRRG |
| | LLRPPVEADALWRAPMIVEGWRGGHSVVVDAVAPPLDLPQPCAWTAVRLSGDPRQR |
| | WGLHLAVPPLGQVQPPDPLKATLAVSMRHRGGVRVRTLQAMAVDADAPMQRHLQV |
| | PLTLQRGGGLQWGIHSRGVRRREARSMASWEGPPIWTGLQLVNRWKGQGSALLAPD |
| | RPPDTPPYAPDAAVAPAQPDTKRARRTLKEACTVCRCAPGHMRQLQVTLTGDGTWR |
| | RFRLRAPQGAKRKAEVLKVATQHDERIANYTAWYLKRPEHAAGCDTCDGDSRLDGA |
| | CRGCRPLLVGDQCFRRYLDKIEADRDDGLAQIKPKAQEAVAAMAAKRDARAQKVAA |
| | RAAKLSEATGQRTAATRDASHEARAQKELEAVATEGTTVRHDAAAVSAFGSWVARK |
| | GDEYRHQVGVLANRLEHGLRLQELMAPDSVVADQQRASGHARVGYRYVLTAM |
| SEQ | AVAHPVGRGNAGSPGARGPEELPRQLVNRASNVTRPATYGCAPCRHVRLSIPKPVLTG |
| ID | CRACEQTTHPAPKRAVRGGADAAKYDLAAFFAGWAADLEGRNRRRQVHAPLDPQP |
| NO: | DPNHEPAVTLQKIDLAEVSIEEFQRVLARSVKHRHDGRASREREKARAYAQVAKKRR |
| 127 | NSHAHGARTRRAVRRQTRAVRRAHRMGANSGEILVASGAEDPVPEAIDHAAQLRRRI |
| | RACARDLEGLRHLSRRYLKTLEKPCRRPRAPDLGRARCHALVESLQAAERELEELRRC |
| | DSPDTAMRRLDAVLAAAASTDATFATGWTVVGMDLGVAPRGSAAPEVSPMEMAISV |
| | FWRKGSRRVIVSKPIAGMPIRRHELIRLEGLGTLRLDGNHYTGAGVTKGRGLSEGTEP |
| | DFREKSPSTLGFTLSDYRHESRWRPYGAKQGKTARQFFAAMSRELRALVEHQVLAPM |
| | GPPLLEAHERRFETLLKGQDNKSIHAGGGGRYVWRGPPDSKKRPAADGDWFRFGRG |
| | HADHRGWANKRHELAANYLQSAFRLWSTLAEAQEPTPYARYKYTRVTM |
| SEQ | WDFLTLQVYERHTSPEVCVAGNSTKCASGTRKSDHTHGVGVKLGAQEINVSANDDR |
| ID | DHEVGCNICVISRVSLDIKGWRYGCESCVQSTPEWRSIVRFDRNHKEAKGECLSRFEY |
| NO: | WGAQSIARSLKRNKLMGGVNLDELAIVQNENVVKTSLKHLFDKRKDRIQANLKAVK |
| 128 | VRMRERRKSGRQRKALRRQCRKLKRYLRSYDPSDIKEGNSCSAFTKLGLDIGISPNKPP |
| | KIEPKVEVVFSLFYQGACDKIVTVSSPESPLPRSWKIKIDGIRALYVKSTKVKFGGRTFR |
| | AGQRNNRRKVRPPNVKKGKRKGSRSQFFNKFAVGLDAVSQQLPIASVQGLWGRAET |
| | KKAQTICLKQLESNKPLKESQRCLFLADNWVVRVCGFLRALSQRQGPTPYIRYRYRCN |
| | M |
| SEQ | ARNVGQRNASRQSKRESAKARSRRVTGGHASVTQGVALINAAANADRDHTTGCEPC |
| ID | TWERVNLPLQEVIHGCDSCTKSSPFWRDIKVVNKGYREAKEEIMRIASGISADHLSRAL |
| NO: | SHNKVMGRLNLDEVCILDFRTVLDTSLKHLTDSRSNGIKEHIRAVHRKIRMRRKSGKT |
| 129 | ARALRKQYFALRRQWKAGHKPNSIREGNSLTALRAVGFDVGVSEGTEPMPAPQTEVV |
| | LSVFYKGSATRILRISSPHPIAKRSWKVKIAGIKALKLIRREHDFSFGRETYNASQRAEK |
| | RKFSPHAARKDFFNSFAVQLDRLAQQLCVSSVENLWVTEPQQKLLTLAKDTAPYGIRE |
| | GARFADTRARLAWNWVFRVCGFTRALHQEQEPTPYCRFTWRSKM |

[0358] In some embodiments, the Type V CRISPR/Cas enzyme is a CasΦ nuclease. A CasΦ polypeptide can function as an endonuclease that catalyzes cleavage at a specific sequence in a target nucleic acid. A programmable CasΦ nuclease of the present disclosure may have a single active site in a RuvC domain that is capable of catalyzing pre-crRNA processing and nicking or cleaving of nucleic acids. This compact catalytic site may render the programmable CasΦ nuclease especially advantageous for genome engineering and new functionalities for genome manipulation.

[0359] TABLE 3 provides amino acid sequences of illustrative Case polypeptides that can be used in compositions and methods of the disclosure.

TABLE 3
CasΦ Amino Acid Sequences

| | SEQ ID | |
|---|---|---|
| Name | NO | Amino Acid Sequence |
| CasΦ.1 | SEQ ID | MADTPTLFTQFLRHHLPGQRFRKDILKQAGRILANKGEDATIA |
| | NO: 274 | FLRGKSEESPPDFQPPVKCPIIACSRPLTEWPIYQASVAIQGYV |
| | | YGQSLAEFEASDPGCSKDGLLGWFDKTGVCTDYFSVQGLNLI |
| | | FQNARKRYIGVQTKVTNRNEKRHKKLKRINAKRIAEGLPELT |
| | | SDEPESALDETGHLIDPPGLNTNIYCYQQVSPKPLALSEVNQLP |
| | | TAYAGYSTSGDDPIQPMVTKDRLSISKGQPGYIPEHQRALLSQ |
| | | KKHRRMRGYGLKARALLVIVRIQDDWAVIDLRSLLRNAYWR |
| | | RIVQTKEPSTITKLLKLVTGDPVLDATRMVATFTYKPGIVQVR |
| | | SAKCLKNKQGSKLFSERYLNETVSVTSIDLGSNNLVAVATYR |
| | | LVNGNTPELLQRFTLPSHLVKDFERYKQAHDTLEDSIQKTAV |
| | | ASLPQGQQTEIRMWSMYGFREAQERVCQELGLADGSIPWNV |
| | | MTATSTILTDLFLARGGDPKKCMFTSEPKKKKNSKQVLYKIR |
| | | DRAWAKMYRTLLSKETREAWNKALWGLKRGSPDYARLSKR |
| | | KEELARRCVNYTISTAEKRAQCGRTIVALEDLNIGFFHGRGKQ |
| | | EPGWVGLFTRKKENRWLMQALHKAFLELAHHRGYHVIEVNP |
| | | AYTSQTCPVCRHCDPDNRDQHNREAFHCIGCGFRGNADLDV |
| | | ATHNIAMVAITGESLKRARGSVASKTPQPLAAE |
| CasΦ.2 | SEQ ID | MPKPAVESEFSKVLKKHFPGERFRSSYMKRGGKILAAQGEEA |
| | NO: 275 | VVAYLQGKSEEEPPNFQPPAKCHVVTKSRDFAEWPIMKASEA |
| | | IQRYIYALSTTERAACKPGKSSESHAAWFAATGVSNHGYSHV |
| | | QGLNLIFDHTLGRYDGVLKKVQLRNEKARARLESINASRADE |
| | | GLPEIKAEEEEVATNETGHLLQPPGINPSFYVYQTISPQAYRPR |
| | | DEIVLPPEYAGYVRDPNAPIPLGVVRNRCDIQKGCPGYIPEWQ |
| | | REAGTAISPKTGKAVTVPGLSPKKNKRMRRYWRSEKEKAQD |
| | | ALLVTVRIGTDWVVIDVRGLLRNARWRTIAPKDISLNALLDLF |
| | | TGDPVIDVRRNIVTFTYTLDACGTYARKWTLKGKQTKATLD |
| | | KLTATQTVALVAIDLGQTNPISAGISRVTQENGALQCEPLDRF |
| | | TLPDDLLKDISAYRIAWDRNEEELRARSVEALPEAQQAEVRA |
| | | LDGVSKETARTQLCADFGLDPKRLPWDKMSSNTTFISEALLS |
| | | NSVSRDQVFFTPAPKKGAKKKAPVEVMRKDRTWARAYKPRL |
| | | SVEAQKLKNEALWALKRTSPEYLKLSRRKEELCRRSINYVIEK |
| | | TRRRTQCQIVIPVIEDLNVRFFHGSGKRLPGWDNFFTAKKENR |
| | | WFIQGLHKAFSDLRTHRSFYVFEVRPERTSITCPKCGHCEVGN |
| | | RDGEAFQCLSCGKTCNADLDVATHNLTQVALTGKTMPKREE |
| | | PRDAQGTAPARKTKKASKSKAPPAEREDQTPAQEPSQTS |
| CasΦ.3 | SEQ ID | MYILEMADLKSEPSLLAKLLRDRFPGKYWLPKYWKLAEKKR |
| | NO: 276 | LTGGEEAACEYMADKQLDSPPPNFRPPARCVILAKSRPFEDW |
| | | PVHRVASKAQSFVIGLSEQGFAALRAAPPSTADARRDWLRSH |
| | | GASEDDLMALEAQLLETIMGNAISLHGGVLKKIDNANVKAA |
| | | KRLSGRNEARLNKGLQELPPEQEGSAYGADGLLVNPPGLNLN |
| | | IYCRKSCCPKPVKNTARFVGHYPGYLRDSDSILISGTMDRLTII |
| | | EGMPGHIPAWQREQGLVKPGGRRRRLSGSESNMRQKVDPST |
| | | GPRRSTRSGTVNRSNQRTGRNGDPLLVEIRMKEDWVLLDAR |
| | | GLLRNLRWRESKRGLSCDHEDLSLSGLLALFSGDPVIDPVRNE |
| | | VVFLYGEGIIPVRSTKPVGTRQSKKLLERQASMGPLTLISCDL |
| | | GQTNLIAGRASAISLTHGSLGVRSSVRIELDPEIIKSFERLRKDA |
| | | DRLETEILTAAKETLSDEQRGEVNSHEKDSPQTAKASLCRELG |
| | | LHPPSLPWGQMGPSTTFIADMLISHGRDDDAFLSHGEFPTLEK |
| | | RKKFDKRFCLESRPLLSSETRKALNESLWEVKRTSSEYARLSQ |
| | | RKKEMARRAVNFVVEISRRKTGLSNVIVNIEDLNVRIFHGGG |
| | | KQAPGWDGFFRPKSENRWFIQAIHKAFSDLAAHHGIPVIESDP |
| | | QRTSMTCPECGHCDSKNRNGVRFLCKGCGASMDADFDAACR |
| | | NLERVALTGKPMPKPSTSCERLLSATTGKVCSDHSLSHDAIEK |
| | | AS |
| CasΦ.4 | SEQ ID | MEKEITELTKIRREFPNKKFSSTDMKKAGKLLKAEGPDAVRD |
| | NO: 277 | FLNSCQEIIGDFKPPVKTNIVSISRPFEEWPVSMVGRAIQEYYFS |
| | | LTKEELESVHPGTSSEDHKSFFNITGLSNYNYTSVQGLNLIFKN |
| | | AKAIYDGTLVKANNKNKKLEKKFNEINHKRSLEGLPIITPDFE |
| | | EPFDENGHLNNPPGINRNIYGYQGCAAKVFVPSKHKMVSLPK |
| | | EYEGYNRDPNLSLAGFRNRLEIPEGEPGHVPWFQRMDIPEGQI |
| | | GHVNKIQRFNFVHGKNSGKVKFSDKTGRVKRYHHSKYKDAT |
| | | KPYKFLEESKKVSALDSILAIITIGDDWVVFDIRGLYRNVFYRE |
| | | LAQKGLTAVQLLDLFTGDPVIDPKKGVVTFSYKEGVVPVFSQ |
| | | KIVPRFKSRDTLEKLTSQGPVALLSVDLGQNEPVAARVCSLK |
| | | NINDKITLDNSCRISFLDDYKKQIKDYRDSLDELEIKIRLEAINS |
| | | LETNQQVEIRDLDVFSADRAKANTVDMFDIDPNLISWDSMSD |
| | | ARVSTQISDLYLKNGGDESRVYFEINNKRIKRSDYNISQLVRP |
| | | KLSDSTRKNLNDSIWKLKRTSEEYLKLSKRKLELSRAVVNYTI |
| | | RQSKLLSGINDIVIILEDLDVKKKFNGRGIRDIGWDNFFSSRKE |
| | | NRWFIPAFHKAFSELSSNRGLCVIEVNPAWTSATCPDCGFCSK |
| | | ENRDGINFTCRKCGVSYHADIDVATLNIARVAVLGKPMSGPA |
| | | DRERLGDTKKPRVARSRKTMKRKDISNSTVEAMVTA |
| CasΦ.5 | SEQ ID | MDMLDTETNYATETPAQQQDYSPKPPKKAQRAPKGFSKKAR |
| | NO: 278 | PEKKPPKPITLFTQKHFSGVRFLKRVIRDASKILKLSESRTITFL |
| | | EQAIERDGSAPPDVTPPVHNTIMAVTRPFEEWPEVILSKALQK |
| | | HCYALTKKIKIKTWPKKGPGKKCLAAWSARTKIPLIPGQVQA |
| | | TNGLFDRIGSIYDGVEKKVTNRNANKKLEYDEAIKEGRNPAV |
| | | PEYETAYNIDGTLINKPGYNPNLYITQSRTPRLITEADRPLVEKI |
| | | LWQMVEKKTQSRNQARRARLEKAAHLQGLPVPKFVPEKVD |
| | | RSQKIEIRIIDPLDKIEPYMPQDRMAIKASQDGHVPYWQRPFLS |
| | | KRRNRRVRAGWGKQVSSIQAWLTGALLVIVRLGNEAFLADIR |
| | | GALRNAQWRKLLKPDATYQSLFNLFTGDPVVNTRTNHLTMA |
| | | YREGVVNIVKSRSFKGRQTREHLLTLLGQGKTVAGVSFDLGQ |
| | | KHAAGLLAAHFGLGEDGNPVFTPIQACFLPQRYLDSLTNYRN |
| | | RYDALTLDMRRQSLLALTPAQQQEFADAQRDPGGQAKRACC |
| | | LKLNLNPDEIRWDLVSGISTMISDLYIERGGDPRDVHQQVETK |
| | | PKGKRKSEIRILKIRDGKWAYDFRPKIADETRKAQREQLWKL |
| | | QKASSEFERLSRYKINIARAIANWALQWGRELSGCDIVIPVLE |
| | | DLNVGSKFFDGKGKWLLGWDNRFTPKKENRWFIKVLHKAV |
| | | AELAPHRGVPVYEVMPHRTSMTCPACHYCHPTNREGDRFEC |
| | | QSCHVVKNTDRDVAPYNILRVAVEGKTLDRWQAEKKPQAEP |
| | | DRPMILIDNQES |
| CasΦ.6 | SEQ ID | MDMLDTETNYATETPAQQQDYSPKPPKKAQRAPKGFSKKAR |
| | NO: 279 | PEKKPPKPITLFTQKHFSGVRFLKRVIRDASKILKLSESRTITFL |
| | | EQAIERDGSAPPDVTPPVHNTIMAVTRPFEEWPEVILSKALQK |
| | | HCYALTKKIKIKTWPKKGPGKKCLAAWSARTKIPLIPGQVQA |
| | | TNGLFDRIGSIYDGVEKKVTNRNANKKLEYDEAIKEGRNPAV |
| | | PEYETAYNIDGTLINKPGYNPNLYITQSRTPRLITEADRPLVEKI |
| | | LWQMVEKKTQSRNQARRARLEKAAHLQGLPVPKFVPEKVD |
| | | RSQKIEIRIIDPLDKIEPYMPQDRMAIKASQDGHVPYWQRPFLS |
| | | KRRNRRVRAGWGKQVSSIQAWLTGALLVIVRLGNEAFLADIR |
| | | GALRNAQWRKLLKPDATYQSLFNLFTGDPVVNTRTNHLTMA |
| | | YREGVVDIVKSRSFKGRQTREHLLTLLGQGKTVAGVSFDLGQ |
| | | KHAAGLLAAHFGLGEDGNPVFTPIQACFLPQRYLDSLTNYRN |
| | | RYDALTLDMRRQSLLALTPAQQQEFADAQRDPGGQAKRACC |
| | | LKLNLNPDEIRWDLVSGISTMISDLYIERGGDPRDVHQQVETK |
| | | PKGKRKSEIRILKIRDGKWAYDFRPKIADETRKAQREQLWKL |
| | | QKASSEFERLSRYKINIARAIANWALQWGRELSGCDIVIPVLE |
| | | DLNVGSKFFDGKGKWLLGWDNRFTPKKENRWFIKVLHKAV |
| | | AELAPHKGVPVYEVMPHRTSMTCPACHYCHPTNREGDRFEC |
| | | QSCHVVKNTDRDVAPYNILRVAVEGKTLDRWQAEKKPQAEP |
| | | DRPMILIDNQES |
| CasΦ.7 | SEQ ID | MSSLPTPLELLKQKHADLFKGLQFSSKDNKMAGKVLKKDGE |
| | NO: 280 | EAALAFLSERGVSRGELPNFRPPAKTLVVAQSRPFEEFPIYRVS |
| | | EAIQLYVYSLSVKELETVPSGSSTKKEHQRFFQDSSVPDFGYT |
| | | SVQGLNKIFGLARGIYLGVITRGENQLQKAKSKHEALNKKRR |
| | | ASGEAETEFDPTPYEYMTPERKLAKPPGVNHSIMCYVDISVDE |
| | | FDFRNPDGIVLPSEYAGYCREINTAIEKGTVDRLGHLKGGPGY |
| | | IPGHQRKESTTEGPKINFRKGRIRRSYTALYAKRDSRRVRQGK |
| | | LALPSYRHHMMRLNSNAESAILAVIFFGKDWVVFDLRGLLRN |
| | | VRWRNLFVDGSTPSTLLGMFGDPVIDPKRGVVAFCYKEQIVP |
| | | VVSKSITKMVKAPELLNKLYLKSEDPLVLVAIDLGQTNPVGV |
| | | GVYRVMNASLDYEVVTRFALESELLREIESYRQRTNAFEAQIR |
| | | AETFDAMTSEEQEEITRVRAFSASKAKENVCHRFGMPVDAVD |
| | | WATMGSNTIHIAKWVMRHGDPSLVEVLEYRKDNEIKLDKNG |
| | | VPKKVKLTDKRIANLTSIRLRFSQETSKHYNDTMWELRRKHP |
| | | VYQKLSKSKADFSRRVVNSIIRRVNHLVPRARIVFIIEDLKNLG |
| | | KVFHGSGKRELGWDSYFEPKSENRWFIQVLHKAFSETGKHK |
| | | GYYIIECWPNWTSCTCPKCSCCDSENRHGEVFRCLACGYTCN |
| | | TDFGTAPDNLVKIATTGKGLPGPKKRCKGSSKGKNPKIARSSE |
| | | TGVSVTESGAPKVKKSSPTQTSQSSSQSAP |
| CasΦ.8 | SEQ ID | MNKIEKEKTPLAKLMNENFAGLRFPFAIIKQAGKKLLKEGEL |
| | NO: 281 | KTIEYMTGKGSIEPLPNFKPPVKCLIVAKRRDLKYFPICKASCE |
| | | IQSYVYSLNYKDFMDYFSTPMTSQKQHEEFFKKSGLNIEYQN |
| | | VAGLNLIFNNVKNTYNGVILKVKNRNEKLKKKAIKNNYEFEE |
| | | IKTFNDDGCLINKPGINNVIYCFQSISPKILKNITHLPKEYNDYD |
| | | CSVDRNIIQKYVSRLDIPESQPGHVPEWQRKLPEFNNTNNPRR |
| | | RRKWYSNGRNISKGYSVDQVNQAKIEDSLLAQIKIGEDWIILD |
| | | IRGLLRDLNRRELISYKNKLTIKDVLGFFSDYPIIDIKKNLVTFC |
| | | YKEGVIQVVSQKSIGNKKSKQLLEKLIENKPIALVSIDLGQTNP |
| | | VSVKISKLNKINNKISIESFTYRFLNEEILKEIEKYRKDYDKLEL |
| | | KLINEA |
| CasΦ.9 | SEQ ID | MDMLDTETNYATETPSQQQDYSPKPPKKDRRAPKGFSKKAR |
| | NO: 282 | PEKKPPKPITLFTQKHFSGVRFLKRVIRDASKILKLSESRTITFL |
| | | EQAIERDGSAPPDVTPPVHNTIMAVTRPFEEWPEVILSKALQK |
| | | HCYALTKKIKIKTWPKKGPGKKCLAAWSARTKIPLIPGQVQA |
| | | TNGLFDRIGSIYDGVEKKVTNRNANKKLEYDEAIKEGRNPAV |
| | | PEYETAYNIDGTLINKPGYNPNLYITQSRTPRLITEADRPLVEKI |
| | | LWQMVEKKTQSRNQARRARLEKAAHLQGLPVPKFVPEKVD |
| | | RSQKIEIRIIDPLDKIEPYMPQDRMAIKASQDGHVPYWQRPFLS |
| | | KRRNRRVRAGWGKQVSSIQAWLTGALLVIVRLGNEAFLADIR |
| | | GALRNAQWRKLLKPDATYQSLFNLFTGDPVVNTRTNHLTMA |
| | | YREGVVDIVKSRSFKGRQTREHLLTLLGQGKTVAGVSFDLGQ |
| | | KHAAGLLAAHFGLGEDGNPVFTPIQACFLPQRYLDSLTNYRN |
| | | RYDALTLDMRRQSLLALTPAQQQEFADAQRDPGGQAKRACC |
| | | LKLNLNPDEIRWDLVSGISTMISDLYIERGGDPRDVHQQVETK |
| | | PKGKRKSEIRILKIRDGKWAYDFRPKIADETRKAQREQLWKL |
| | | QKASSEFERLSRYKINIARAIANWALQWGRELSGCDIVIPVLE |
| | | DLNVGSKFFDGKGKWLLGWDNRFTPKKENRWFIKVLHKAV |
| | | AELAPHRGVPVYEVMPHRTSMTCPACHYCHPTNREGDRFEC |
| | | QSCHVVKNTDRDVAPYNILRVAVEGKTLDRWQAEKKPQAEP |
| | | DRPMILIDNQES |
| CasΦ.10 | SEQ ID | MDMLDTETNYATETPSQQQDYSPKPPKKDRRAPKGFSKKAR |
| | NO: 283 | PEKKPPKPITLFTQKHFSGVRFLKRVIRDASKILKLSESRTITFL |
| | | EQAIERDGSAPPDVTPPVHNTIMAVTRPFEEWPEVILSKALQK |
| | | HCYALTKKIKIKTWPKKGPGKKCLAAWSARTKIPLIPGQVQA |
| | | TNGLFDRIGSIYDGVEKKVTNRNANKKLEYDEAIKEGRNPAV |
| | | PEYETAYNIDGTLINKPGYNPNLYITQSRTPRLITEADRPLVEKI |
| | | LWQMVEKKTQSRNQARRARLEKAAHLQGLPVPKFVPEKVD |
| | | RSQKIEIRIIDPLDKIEPYMPQDRMAIKASQDGHVPYWQRPFLS |
| | | KRRNRRVRAGWGKQVSSIQAWLTGALLVIVRLGNEAFLADIR |
| | | GALRNAQWRKLLKPDATYQSLFNLFTGDPVVNTRTNHLTMA |
| | | YREGVVNIVKSRSFKGRQTREHLLTLLGQGKTVAGVSFDLGQ |
| | | KHAAGLLAAHFGLGEDGNPVFTPIQACFLPQRYLDSLTNYRN |
| | | RYDALTLDMRRQSLLALTPAQQQEFADAQRDPGGQAKRACC |
| | | LKLNLNPDEIRWDLVSGISTMISDLYIERGGDPRDVHQQVETK |
| | | PKGKRKSEIRILKIRDGKWAYDFRPKIADETRKAQREQLWKL |
| | | QKASSEFERLSRYKINIARAIANWALQWGRELSGCDIVIPVLE |
| | | DLNVGSKFFDGKGKWLLGWDNRFTPKKENRWFIKVLHKAV |
| | | AELAPHRGVPVYEVMPHRTSMTCPACHYCHPTNREGDRFEC |
| | | QSCHVVKNTDRDVAPYNILRVAVEGKTLDRWQAEKKPQAEP |
| | | DRPMILIDNQES |
| CasΦ.11 | SEQ ID | MSNKTTPPSPLSLLLRAHFPGLKFESQDYKIAGKKLRDGGPEA |
| | NO: 284 | VISYLTGKGQAKLKDVKPPAKAFVIAQSRPFIEWDLVRVSRQI |
| | | QEKIFGIPATKGRPKQDGLSETAFNEAVASLEVDGKSKLNEET |
| | | RAAFYEVLGLDAPSLHAQAQNALIKSAISIREGVLKKVENRNE |
| | | KNLSKTKRRKEAGEEATFVEEKAHDERGYLIHPPGVNQTIPG |
| | | YQAVVIKSCPSDFIGLPSGCLAKESAEALTDYLPHDRMTIPKG |
| | | QPGYVPEWQHPLLNRRKNRRRRDWYSASLNKPKATCSKRSG |
| | | TPNRKNSRTDQIQSGRFKGAIPVLMRFQDEWVIIDIRGLLRNA |
| | | RYRKLLKEKSTIPDLLSLFTGDPSIDMRQGVCTFIYKAGQACS |
| | | AKMVKTKNAPEILSELTKSGPVVLVSIDLGQTNPIAAKVSRVT |
| | | QLSDGQLSHETLLRELLSNDSSDGKEIARYRVASDRLRDKLA |
| | | NLAVERLSPEHKSEILRAKNDTPALCKARVCAALGLNPEMIA |
| | | WDKMTPYTEFLATAYLEKGGDRKVATLKPKNRPEMLRRDIK |
| | | FKGTEGVRIEVSPEAAEAYREAQWDLQRTSPEYLRLSTWKQE |
| | | LTKRILNQLRHKAAKSSQCEVVVMAFEDLNIKMMHGNGKW |
| | | ADGGWDAFFIKKRENRWFMQAFHKSLTELGAHKGVPTIEVT |
| | | PHRTSITCTKCGHCDKANRDGERFACQKCGFVAHADLEIATD |
| | | NIERVALTGKPMPKPESERSGDAKKSVGARKAAFKPEEDAEA |
| | | AE |
| CasΦ.12 | SEQ ID | MIKPTVSQFLTPGFKLIRNHSRTAGLKLKNEGEEACKKFVREN |
| | NO: 285 | EIPKDECPNFQGGPAIANIIAKSREFTEWEIYQSSLAIQEVIFTLP |
| | | KDKLPEPILKEEWRAQWLSEHGLDTVPYKEAAGLNLIIKNAV |
| | | NTYKGVQVKVDNKNKNNLAKINRKNEIAKLNGEQEISFEEIK |
| | | AFDDKGYLLQKPSPNKSIYCYQSVSPKPFITSKYHNVNLPEEYI |
| | | GYYRKSNEPIVSPYQFDRLRIPIGEPGYVPKWQYTFLSKKENK |
| | | RRKLSKRIKNVSPILGIICIKKDWCVFDMRGLLRTNHWKKYH |
| | | KPTDSINDLFDYFTGDPVIDTKANVVRFRYKMENGIVNYKPV |
| | | REKKGKELLENICDQNGSCKLATVDVGQNNPVAIGLFELKKV |
| | | NGELTKTLISRHPTPIDFCNKITAYRERYDKLESSIKLDAIKQLT |
| | | SEQKIEVDNYNNNFTPQNTKQIVCSKLNINPNDLPWDKMISGT |
| | | HFISEKAQVSNKSEIYFTSTDKGKTKDVMKSDYKWFQDYKPK |
| | | LSKEVRDALSDIEWRLRRESLEFNKLSKSREQDARQLANWISS |
| | | MCDVIGIENLVKKNNFFGGSGKREPGWDNFYKPKKENRWWI |
| | | NAIHKALTELSQNKGKRVILLPAMRTSITCPKCKYCDSKNRN |
| | | GEKFNCLKCGIELNADIDVATENLATVAITAQSMPKPTCERSG |
| | | DAKKPVRARKAKAPEFHDKLAPSYTVVLREAV |
| CasΦ.13 | SEQ ID | MRQPAEKTAFQVFRQEVIGTQKLSGGDAKTAGRLYKQGKME |
| | NO: 286 | AAREWLLKGARDDVPPNFQPPAKCLVVAVSHPFEEWDISKTN |
| | | HDVQAYIYAQPLQAEGHLNGLSEKWEDTSADQHKLWFEKTG |
| | | VPDRGLPVQAINKIAKAAVNRAFGVVRKVENRNEKRRSRDN |
| | | RIAEHNRENGLTEVVREAPEVATNADGFLLHPPGIDPSILSYAS |
| | | VSPVPYNSSKHSFVRLPEEYQAYNVEPDAPIPQFVVEDRFAIPP |
| | | GQPGYVPEWQRLKCSTNKHRRMRQWSNQDYKPKAGRRAKP |
| | | LEFQAHLTRERAKGALLVVMRIKEDWVVFDVRGLLRNVEWR |
| | | KVLSEEAREKLTLKGLLDLFTGDPVIDTKRGIVTFLYKAEITKI |
| | | LSKRTVKTKNARDLLLRLTEPGEDGLRREVGLVAVDLGQTHP |
| | | IAAAIYRIGRTSAGALESTVLHRQGLREDQKEKLKEYRKRHT |
| | | ALDSRLRKEAFETLSVEQQKEIVTVSGSGAQITKDKVCNYLG |
| | | VDPSTLPWEKMGSYTHFISDDFLRRGGDPNIVHFDRQPKKGK |
| | | VSKKSQRIKRSDSQWVGRMRPRLSQETAKARMEADWAAQN |
| | | ENEEYKRLARSKQELARWCVNTLLQNTRCITQCDEIVVVIED |
| | | LNVKSLHGKGAREPGWDNFFTPKTENRWFIQILHKTFSELPK |
| | | HRGEHVIEGCPLRTSITCPACSYCDKNSRNGEKFVCVACGATF |
| | | HADFEVATYNLVRLATTGMPMPKSLERQGGGEKAGGARKA |
| | | RKKAKQVEKIVVQANANVTMNGASLHSP |
| CasΦ.14 | SEQ ID | MSSLPTPLELLKQKHADLFKGLQFSSKDNKMAGKVLKKDGE |
| | NO: 287 | EAALAFLSERGVSRGELPNFRPPAKTLVVAQSRPFEEFPIYRVS |
| | | EAIQLYVYSLSVKELETVPSGSSTKKEHQRFFQDSSVPDFGYT |
| | | SVQGLNKIFGLARGIYLGVITRGENQLQKAKSKHEALNKKRR |
| | | ASGEAETEFDPTPYEYMTPERKLAKPPGVNHSIMCYVDISVDE |
| | | FDFRNPDGIVLPSEYAGYCREINTAIEKGTVDRLGHLKGGPGY |
| | | IPGHQRKESTTEGPKINFRKGRIRRSYTALYAKRDSRRVRQGK |
| | | LALPSYRHHMMRLNSNAESAILAVIFFGKDWVVFDLRGLLRN |
| | | VRWRNLFVDGSTPSTLLGMFGDPVIDPKRGVVAFCYKEQIVP |
| | | VVSKSITKMVKAPELLNKLYLKSEDPLVLVAIDLGQTNPVGV |
| | | GVYRVMNASLDYEVVTRFALESELLREIESYRQRTNAFEAQIR |
| | | AETFDAMTSEEQEEITRVRAFSASKAKENVCHRFGMPVDAVD |
| | | WATMGSNTIHIAKWVMRHGDPSLVEVLEYRKDNEIKLDKNG |
| | | VPKKVKLTDKRIANLTSIRLRFSQETSKHYNDTMWELRRKHP |
| | | VYQKLSKSKADFSRRVVNSIIRRVNHLVPRARIVFIIEDLKNLG |
| | | KVFHGSGKRELGWDSYFEPKSENRWFIQVLHKAFSETGKHK |
| | | GYYIIECWPNWTSCTCPKCSCCDSENRHGEVFRCLACGYTCN |
| | | TDFGTAPDNLVKIATTGKGLPGPKKRCKGSSKGKNPKIARSSE |
| | | TGVSVTESGAPKVKKSSPTQTSQSSSQSAP |
| CasΦ.15 | SEQ ID | MIKPTVSQFLTPGFKLIRNHSRTAGLKLKNEGEEACKKFVREN |
| | NO: 288 | EIPKDECPNFQGGPAIANIIAKSREFTEWEIYQSSLAIQEVIFTLP |
| | | KDKLPEPILKEEWRAQWLSEHGLDTVPYKEAAGLNLIIKNAV |
| | | NTYKGVQVKVDNKNKNNLAKINRKNEIAKLNGEQEISFEEIK |
| | | AFDDKGYLLQKPSPNKSIYCYQSVSPKPFITSKYHNVNLPEEYI |
| | | GYYRKSNEPIVSPYQFDRLRIPIGEPGYVPKWQYTFLSKKENK |
| | | RRKLSKRIKNVSPILGIICIKKDWCVFDMRGLLRTNHWKKYH |
| | | KPTDSINDLFDYFTGDPVIDTKANVVRFRYKMENGIVNYKPV |
| | | REKKGKELLENICDQNGSCKLATVDVGQNNPVAIGLFELKKV |
| | | NGELTKTLISRHPTPIDFCNKITAYRERYDKLESSIKLDAIKQLT |
| | | SEQKIEVDNYNNNFTPQNTKQIVCSKLNINPNDLPWDKMISGT |
| | | HFISEKAQVSNKSEIYFTSTDKGKTKDVMKSDYKWFQDYKPK |
| | | LSKEVRDALSDIEWRLRRESLEFNKLSKSREQDARQLANWISS |
| | | MCDVIGIENLVKKNNFFGGSGKREPGWDNFYKPKKENRWWI |
| | | NAIHKALTELSQNKGKRVILLPAMRTSITCPKCKYCDSKNRN |
| | | GEKFNCLKCGIELNADIDVATENLATVAITAQSMPKPTCERSG |
| | | DAKKPVRARKAKAPEFHDKLAPSYTVVLREAV |
| CasΦ.16 | SEQ ID | MSNKTTPPSPLSLLLRAHFPGLKFESQDYKIAGKKLRDGGPEA |
| | NO: 289 | VISYLTGKGQAKLKDVKPPAKAFVIAQSRPFIEWDLVRVSRQI |
| | | QEKIFGIPATKGRPKQDGLSETAFNEAVASLEVDGKSKLNEET |
| | | RAAFYEVLGLDAPSLHAQAQNALIKSAISIREGVLKKVENRNE |
| | | KNLSKTKRRKEAGEEATFVEEKAHDERGYLIHPPGVNQTIPG |
| | | YQAVVIKSCPSDFIGLPSGCLAKESAEALTDYLPHDRMTIPKG |
| | | QPGYVPEWQHPLLNRRKNRRRRDWYSASLNKPKATCSKRSG |
| | | TPNRKNSRTDQIQSGRFKGAIPVLMRFQDEWVIIDIRGLLRNA |
| | | RYRKLLKEKSTIPDLLSLFTGDPSIDMRQGVCTFIYKAGQACS |
| | | AKMVKTKNAPEILSELTKSGPVVLVSIDLGQTNPIAAKVSRVT |
| | | QLSDGQLSHETLLRELLSNDSSDGKEIARYRVASDRLRDKLA |
| | | NLAVERLSPEHKSEILRAKNDTPALCKARVCAALGLNPEMIA |
| | | WDKMTPYTEFLATAYLEKGGDRKVATLKPKNRPEMLRRDIK |
| | | FKGTEGVRIEVSPEAAEAYREAQWDLQRTSPEYLRLSTWKQE |
| | | LTKRILNQLRHKAAKSSQCEVVVMAFEDLNIKMMHGNGKW |
| | | ADGGWDAFFIKKRENRWFMQAFHKSLTELGAHKGVPTIEVT |
| | | PHRTSITCTKCGHCDKANRDGERFACQKCGFVAHADLEIATD |
| | | NIERVALTGKPMPKPESERSGDAKKSVGARKAAFKPEEDAEA |
| | | AE |
| CasΦ.17 | SEQ ID | MYSLEMADLKSEPSLLAKLLRDRFPGKYWLPKYWKLAEKKR |
| | NO: 290 | LTGGEEAACEYMADKQLDSPPPNFRPPARCVILAKSRPFEDW |
| | | PVHRVASKAQSFVIGLSEQGFAALRAAPPSTADARRDWLRSH |
| | | GASEDDLMALEAQLLETIMGNAISLHGGVLKKIDNANVKAA |
| | | KRLSGRNEARLNKGLQELPPEQEGSAYGADGLLVNPPGLNLN |
| | | IYCRKSCCPKPVKNTARFVGHYPGYLRDSDSILISGTMDRLTII |
| | | EGMPGHIPAWQREQGLVKPGGRRRRLSGSESNMRQKVDPST |
| | | GPRRSTRSGTVNRSNQRTGRNGDPLLVEIRMKEDWVLLDAR |
| | | GLLRNLRWRESKRGLSCDHEDLSLSGLLALFSGDPVIDPVRNE |
| | | VVFLYGEGIIPVRSTKPVGTRQSKKLLERQASMGPLTLISCDL |
| | | GQTNLIAGRASAISLTHGSLGVRSSVRIELDPEIIKSFERLRKDA |
| | | DRLETEILTAAKETLSDEQRGEVNSHEKDSPQTAKASLCRELG |
| | | LHPPSLPWGQMGPSTTFIADMLISHGRDDDAFLSHGEFPTLEK |
| | | RKKFDKRFCLESRPLLSSETRKALNESLWEVKRTSSEYARLSQ |
| | | RKKEMARRAVNFVVEISRRKTGLSNVIVNIEDLNVRIFHGGG |
| | | KQAPGWDGFFRPKSENRWFIQAIHKAFSDLAAHHGIPVIESDP |
| | | QRTSMTCPECGHCDSKNRNGVRFLCKGCGASMDADFDAACR |
| | | NLERVALTGKPMPKPSTSCERLLSATTGKVCSDHSLSHDAIEK |
| | | AS |
| CasΦ.18 | SEQ ID | MEKEITELTKIRREFPNKKFSSTDMKKAGKLLKAEGPDAVRD |
| | NO: 291 | FLNSCQEIIGDFKPPVKTNIVSISRPFEEWPVSMVGRAIQEYYFS |
| | | LTKEELESVHPGTSSEDHKSFFNITGLSNYNYTSVQGLNLIFKN |
| | | AKAIYDGTLVKANNKNKKLEKKFNEINHKRSLEGLPIITPDFE |
| | | EPFDENGHLNNPPGINRNIYGYQGCAAKVFVPSKHKMVSLPK |
| | | EYEGYNRDPNLSLAGFRNRLEIPEGEPGHVPWFQRMDIPEGQI |
| | | GHVNKIQRFNFVHGKNSGKVKFSDKTGRVKRYHHSKYKDAT |
| | | KPYKFLEESKKVSALDSILAIITIGDDWVVFDIRGLYRNVFYRE |
| | | LAQKGLTAVQLLDLFTGDPVIDPKKGVVTFSYKEGVVPVFSQ |
| | | KIVPRFKSRDTLEKLTSQGPVALLSVDLGQNEPVAARVCSLK |
| | | NINDKITLDNSCRISFLDDYKKQIKDYRDSLDELEIKIRLEAINS |
| | | LETNQQVEIRDLDVFSADRAKANTVDMFDIDPNLISWDSMSD |
| | | ARVSTQISDLYLKNGGDESRVYFEINNKRIKRSDYNISQLVRP |
| | | KLSDSTRKNLNDSIWKLKRTSEEYLKLSKRKLELSRAVVNYTI |
| | | RQSKLLSGINDIVIILEDLDVKKKFNGRGIRDIGWDNFFSSRKE |
| | | NRWFIPAFHKTFSELSSNRGLCVIEVNPAWTSATCPDCGFCSK |
| | | ENRDGINFTCRKCGVSYHADIDVATLNIARVAVLGKPMSGPA |
| | | DRERLGDTKKPRVARSRKTMKRKDISNSTVEAMVTA |
| CasΦ.19 | SEQ ID | MLVRTSTLVQDNKNSRSASRAFLKKPKMPKNKHIKEPTELAK |
| | NO: 292 | LIRELFPGQRFTRAINTQAGKILKHKGRDEVVEFLKNKGIDKE |
| | | QFMDFRPPTKARIVATSGAIEEFSYLRVSMAIQECCFGKYKFP |
| | | KEKVNGKLVLETVGLTKEELDDFLPKKYYENKKSRDRFFLKT |
| | | GICDYGYTYAQGLNEIFRNTRAIYEGVFTKVNNRNEKRREKK |
| | | DKYNEERRSKGLSEEPYDEDESATDESGHLINPPGVNLNIWTC |
| | | EGFCKGPYVTKLSGTPGYEVILPKVFDGYNRDPNEIISCGITDR |
| | | FAIPEGEPGHIPWHQRLEIPEGQPGYVPGHQRFADTGQNNSGK |
| | | ANPNKKGRMRKYYGHGTKYTQPGEYQEVFRKGHREGNKRR |
| | | YWEEDFRSEAHDCILYVIHIGDDWVVCDLRGPLRDAYRRGLV |
| | | PKEGITTQELCNLFSGDPVIDPKHGVVTFCYKNGLVRAQKTIS |
| | | AGKKSRELLGALTSQGPIALIGVDLGQTEPVGARAFIVNQARG |
| | | SLSLPTLKGSFLLTAENSSSWNVFKGEIKAYREAIDDLAIRLKK |
| | | EAVATLSVEQQTEIESYEAFSAEDAKQLACEKFGVDSSFILWE |
| | | DMTPYHTGPATYYFAKQFLKKNGGNKSLIEYIPYQKKKSKKT |
| | | PKAVLRSDYNIACCVRPKLLPETRKALNEAIRIVQKNSDEYQR |
| | | LSKRKLEFCRRVVNYLVRKAKKLTGLERVIIAIEDLKSLEKFF |
| | | TGSGKRDNGWSNFFRPKKENRWFIPAFHKAFSELAPNRGFYV |
| | | IECNPARTSITDPDCGYCDGDNRDGIKFECKKCGAKHHTDLD |
| | | VAPLNIAIVAVTGRPMPKTVSNKSKRERSGGEKSVGASRKRN |
| | | HRKSKANQEMLDATSSAAE |
| CasΦ.20 | SEQ ID | MPKIKKPTEISLLRKEVFPDLHFAKDRMRAASLVLKNEGREA |
| | NO: 293 | AIEYLRVNHEDKPPNFMPPAKTPYVALSRPLEQWPIAQASIAI |
| | | QKYIFGLTKDEFSATKKLLYGDKSTPNTESRKRWFEVTGVPN |
| | | FGYMSAQGLNAIFSGALARYEGVVQKVENRNKKRFEKLSEK |
| | | NQLLIEEGQPVKDYVPDTAYHTPETLQKLAENNHVRVEDLGD |
| | | MIDRLVHPPGIHRSIYGYQQVPPFAYDPDNPKGIILPKAYAGY |
| | | TRKPHDIIEAMPNRLNIPEGQAGYIPEHQRDKLKKGGRVKRLR |
| | | TTRVRVDATETVRAKAEALNAEKARLRGKEAILAVFQIEEDW |
| | | ALIDMRGLLRNVYMRKLIAAGELTPTTLLGYFTETLTLDPRRT |
| | | EATFCYHLRSEGALHAEYVRHGKNTRELLLDLTKDNEKIALV |
| | | TIDLGQRNPLAAAIFRVGRDASGDLTENSLEPVSRMLLPQAYL |
| | | DQIKAYRDAYDSFRQNIWDTALASLTPEQQRQILAYEAYTPD |
| | | DSKENVLRLLLGGNVMPDDLPWEDMTKNTHYISDRYLADGG |
| | | DPSKVWFVPGPRKRKKNAPPLKKPPKPRELVKRSDHNISHLSE |
| | | FRPQLLKETRDAFEKAKIDTERGHVGYQKLSTRKDQLCKEIL |
| | | NWLEAEAVRLTRCKTMVLGLEDLNGPFFNQGKGKVRGWVS |
| | | FFRQKQENRWIVNGFRKNALARAHDKGKYILELWPSWTSQT |
| | | CPKCKHVHADNRHGDDFVCLQCGARLHADAEVATWNLAVV |
| | | AIQGHSLPGPVREKSNDRKKSGSARKSKKANESGKVVGAWA |
| | | AQATPKRATSKKETGTARNPVYNPLETQASCPAP |
| CasΦ.21 | SEQ ID | MTPSPQIARLVETPLAAALKAHHPGKKFRSDYLKKAGKILKD |
| | NO: 294 | QGVEAAMAHLDGKDQAEPPNFKPPAKCRIVARSREFSEWPIV |
| | | KASVEIQKYIYGLTLEERKACDPGKSSASHKAWFAKTGVNTF |
| | | GYSSVQGFNLIFGHTLGRYDGVLVKTENLNKKRAEKNERFRA |
| | | KALAEGRAEPVCPPLVTATNDTGQDVTLEDGRVVRPGQLLQP |
| | | PGINPNIYAYQQVSPKAYVPGIIELPEEFQGYSRDPNAVILPLV |
| | | PRDRLSIPKGQPGYVPEPHREGLTGRKDRRMRRYYETERGTK |
| | | LKRPPLTAKGRADKANEALLVVVRIDSDWVVMDVRGLLRNA |
| | | RWRRLVSKEGITLNGLLDLFTGDPVLNPKDCSVSRDTGDPVN |
| | | DPRHGVVTFCYKLGVVDVCSKDRPIKGFRTKEVLERLTSSGT |
| | | VGMVSIDLGQTNPVAAAVSRVTKGLQAETLETFTLPDDLLGK |
| | | VRAYRAKTDRMEEGFRRNALRKLTAEQQAEITRYNDATEQQ |
| | | AKALVCSTYGIGPEEVPWERMTSNTTYISDHILDHGGDPDTVF |
| | | FMATKRGQNKPTLHKRKDKAWGQKFRPAISVETRLARQAAE |
| | | WELRRASLEFQKLSVWKTELCRQAVNYVMERTKKRTQCDVI |
| | | IPVIEDLPVPLFHGSGKRDPGWANFFVHKRENRWFIDGLHKAF |
| | | SELGKHRGIYVFEVCPQRTSITCPKCGHCDPDNRDGEKFVCLS |
| | | CQATLNADLDVATTNLVRVALTGKVMPRSERSGDAQTPGPA |
| | | RKARTGKIKGSKPTSAPQGATQTDAKAHLSQTGV |
| CasΦ.22 | SEQ ID | MTPSPQIARLVETPLAAALKAHHPGKKFRSDYLKKAGKILKD |
| | NO: 295 | QGVEAAMAHLDGKDQAEPPNFKPPAKCRIVARSREFSEWPIV |
| | | KASVEIQKYIYGLTLEERKACDPGKSSASHKAWFAKTGVNTF |
| | | GYSSVQGFNLIFGHTLGRYDGVLVKTENLNKKRAEKNERFRA |
| | | KALAEGRAEPVCPPLVTATNDTGQDVTLEDGRVVRPGQLLQP |
| | | PGINPNIYAYQQVSPKAYVPGIIELPEEFQGYSRDPNAVILPLV |
| | | PRDRLSIPKGQPGYVPEPHREGLTGRKDRRMRRYYETERGTK |
| | | LKRPPLTAKGRADKANEALLVVVRIDSDWVVMDVRGLLRNA |
| | | RWRRLVSKEGITLNGLLDLFTGDPVLNPKDCSVSRDTGDPVN |
| | | DPRHGVVTFCYKLGVVDVCSKDRPIKGFRTKEVLERLTSSGT |
| | | VGMVSIDLGQTNPVAAAVSRVTKGLQAETLETFTLPDDLLGK |
| | | VRAYRAKTDRMEEGFRRNALRKLTAEQQAEITRYNDATEQQ |
| | | AKALVCSTYGIGPEEVPWERMTSNTTYISDHILDHGGDPDTVF |
| | | FMATKRGQNKPTLHKRKDKAWGQKFRPAISVETRLARQAAE |
| | | WELRRASLEFQKLSVWKTELCRQAVNYVMERTKKRTQCDVI |
| | | IPVIEDLPVPLFHGSGKRDPGWANFFVHKRENRWFIDGLHKAF |
| | | SELGKHRGIYVFEVCPQRTSITCPKCGHCDPDNRDGEKFVCLS |
| | | CQATLHADLDVATTNLVRVALTGKVMPRSERSGDAQTPGPA |
| | | RKARTGKIKGSKPTSAPQGATQTDAKAHLSQTGV |
| CasΦ.23 | SEQ ID | MKTEKPKTALTLLREEVFPGKKYRLDVLKEAGKKLSTKGRE |
| | NO: 296 | ATIEFLTGKDEERPQNFQPPAKTSIVAQSRPFDQWPIVQVSLA |
| | | VQKYIYGLTQSEFEANKKALYGETGKAISTESRRAWFEATGV |
| | | DNFGFTAAQGINPIFSQAVARYEGVIKKVENRNEKKLKKLTK |
| | | KNLLRLESGEEIEDFEPEATFNEEGRLLQPPGANPNIYCYQQIS |
| | | PRIYDPSDPKGVILPQIYAGYDRKPEDIISAGVPNRLAIPEGQPG |
| | | YIPEHQRAGLKTQGRIRCRASVEAKARAAILAVVHLGEDWVV |
| | | LDLRGLLRNVYWRKLASPGTLTLKGLLDFFTGGPVLDARRGI |
| | | ATFSYTLKSAAAVHAENTYKGKGTREVLLKLTENNSVALVT |
| | | VDLGQRNPLAAMIARVSRTSQGDLTYPESVEPLTRLFLPDPFL |
| | | EEVRKYRSSYDALRLSIREAAIASLTPEQQAEIRYIEKFSAGDA |
| | | KKNVAEVFGIDPTQLPWDAMTPRTTYISDLFLRMGGDRSRVF |
| | | FEVPPKKAKKAPKKPPKKPAGPRIVKRTDGMIARLREIRPRLS |
| | | AETNKAFQEARWEGERSNVAFQKLSVRRKQFARTVVNHLVQ |
| | | TAQKMSRCDTVVLGIEDLNVPFFHGRGKYQPGWEGFFRQKK |
| | | ENRWLINDMHKALSERGPHRGGYVLELTPFWTSLRCPKCGH |
| | | TDSANRDGDDFVCVKCGAKLHSDLEVATANLALVAITGQSIP |
| | | RPPREQSSGKKSTGTARMKKTSGETQGKGSKACVSEALNKIE |
| | | QGTARDPVYNPLNSQVSCPAP |
| CasΦ.24 | SEQ ID | VYNPDMKKPNNIRRIREEHFEGLCFGKDVLTKAGKIYEKDGE |
| | NO: 297 | EAAIDFLMGKDEEDPPNFKPPAKTTIVAQSRPFDQWPIYQVSQ |
| | | AVQERVFAYTEEEFNASKEALFSGDISSKSRDFWFKTNNISDQ |
| | | GIGAQGLNTILSHAFSRYSGVIKKVENRNKKRLKKLSKKNQL |
| | | KIEEGLEILEFKPDSAFNENGLLAQPPGINPNIYGYQAVTPFVF |
| | | DPDNPGDVILPKQYEGYSRKPDDIIEKGPSRLDIPKGQPGYVPE |
| | | HQRKNLKKKGRVRLYRRTPPKTKALASILAVLQIGKDWVLFD |
| | | MRGLLRSVYMREAATPGQISAKDLLDTFTGCPVLNTRTGEFT |
| | | FCYKLRSEGALHARKIYTKGETRTLLTSLTSENNTIALVTVDL |
| | | GQRNPAAIMISRLSRKEELSEKDIQPVSRRLLPDRYLNELKRY |
| | | RDAYDAFRQEVRDEAFTSLCPEHQEQVQQYEALTPEKAKNL |
| | | VLKHFFGTHDPDLPWDDMTSNTHYIANLYLERGGDPSKVFFT |
| | | RPLKKDSKSKKPRKPTKRTDASISRLPEIRPKMPEDARKAFEK |
| | | AKWEIYTGHEKFPKLAKRVNQLCREIANWIEKEAKRLTLCDT |
| | | VVVGIEDLSLPPKRGKGKFQETWQGFFRQKFENRWVIDTLKK |
| | | AIQNRAHDKGKYVLGLAPYWTSQRCPACGFIHKSNRNGDHF |
| | | KCLKCEALFHADSEVATWNLALVAVLGKGITNPDSKKPSGQ |
| | | KKTGTTRKKQIKGKNKGKETVNVPPTTQEVEDIIAFFEKDDET |
| | | VRNPVYKPTGT |
| CasΦ.25 | SEQ ID | MKKPNNIRRIREEHFEGLCFGKDVLTKAGKIYEKDGEEAAIDF |
| | NO: 298 | LMGKDEEDPPNFKPPAKTTIVAQSRPFDQWPIYQVSQAVQER |
| | | VFAYTEEEFNASKEALFSGDISSKSRDFWFKTNNISDQGIGAQ |
| | | GLNTILSHAFSRYSGVIKKVENRNKKRLKKLSKKNQLKIEEGL |
| | | EILEFKPDSAFNENGLLAQPPGINPNIYGYQAVTPFVFDPDNPG |
| | | DVILPKQYEGYSRKPDDIIEKGPSRLDIPKGQPGYVPEHQRKN |
| | | LKKKGRVRLYRRTPPKTKALASILAVLQIGKDWVLFDMRGLL |
| | | RSVYMREAATPGQISAKDLLDTFTGCPVLNTRTGEFTFCYKL |
| | | RSEGALHARKIYTKGETRTLLTSLTSENNTIALVTVDLGQRNP |
| | | AAIMISRLSRKEELSEKDIQPVSRRLLPDRYLNELKRYRDAYD |
| | | AFRQEVRDEAFTSLCPEHQEQVQQYEALTPEKAKNLVLKHFF |
| | | GTHDPDLPWDDMTSNTHYIANLYLERGGDPSKVFFTRPLKKD |
| | | SKSKKPRKPTKRTDASISRLPEIRPKMPEDARKAFEKAKWEIY |
| | | TGHEKFPKLAKRVNQLCREIANWIEKEAKRLTLCDTVVVGIE |
| | | DLSLPPKRGKGKFQETWQGFFRQKFENRWVIDTLKKAIQNRA |
| | | HDKGKYVLGLAPYWTSQRCPACGFIHKSNRNGDHFKCLKCE |
| | | ALFHADSEVATWNLALVAVLGKGITNPDSKKPSGQKKTGTT |
| | | RKKQIKGKNKGKETVNVPPTTQEVEDIIAFFEKDDETVRNPVY |
| | | KPTGT |
| CasΦ.26 | SEQ ID | VIKTHFPAGRFRKDHQKTAGKKLKHEGEEACVEYLRNKVSD |
| | NO: 299 | YPPNFKPPAKGTIVAQSRPFSEWPIVRASEAIQKYVYGLTVAE |
| | | LDVFSPGTSKPSHAEWFAKTGVENYGYRQVQGLNTIFQNTVN |
| | | RFKGVLKKVENRNKKSLKRQEGANRRRVEEGLPEVPVTVES |
| | | ATDDEGRLLQPPGVNPSIYGYQGVAPRVCTDLQGFSGMSVDF |
| | | AGYRRDPDAVLVESLPEGRLSIPKGERGYVPEWQRDPERNKF |
| | | PLREGSRRQRKWYSNACHKPKPGRTSKYDPEALKKASAKDA |
| | | LLVSISIGEDWAIIDVRGLLRDARRRGFTPEEGLSLNSLLGLFT |
| | | EYPVFDVQRGLITFTYKLGQVDVHSRKTVPTFRSRALLESLVA |
| | | KEEIALVSVDLGQTNPASMKVSRVRAQEGALVAEPVHRMFLS |
| | | DVLLGELSSYRKRMDAFEDAIRAQAFETMTPEQQAEITRVCD |
| | | VSVEVARRRVCEKYSISPQDVPWGEMTGHSTFIVDAVLRKGG |
| | | DESLVYFKNKEGETLKFRDLRISRMEGVRPRLTKDTRDALNK |
| | | AVLDLKRAHPTFAKLAKQKLELARRCVNFIEREAKRYTQCER |
| | | VVFVIEDLNVGFFHGKGKRDRGWDAFFTAKKENRWVIQALH |
| | | KAFSDLGLHRGSYVIEVTPQRTSMTCPRCGHCDKGNRNGEKF |
| | | VCLQCGATLHADLEVATDNIERVALTGKAMPKPPVRERSGD |
| | | VQKAGTARKARKPLKPKQKTEPSVQEGSSDDGVDKSPGDAS |
| | | RNPVYNPSDTLSI |
| CasΦ.27 | SEQ ID | MAKAKTLAALLRELLPGQHLAPHHRWVANKLLMTSGDAAA |
| | NO: 300 | FVIGKSVSDPVRGSFRKDVITKAGRIFKKDGPDAAAAFLDGK |
| | | WEDRPPNFQPPAKAAIVAISRSFDEWPIVKVSCAIQQYLYALP |
| | | VQEFESSVPEARAQAHAAWFQDTGVDDCNFKSTQGLNAIFN |
| | | HGKRTYEGVLKKAQNRNDKKNLRLERINAKRAEAGQAPLVA |
| | | GPDESPTDDAGCLLHPPGINANIYCYQQVSPRPYEQSCGIQLPP |
| | | EYAGYNRLSNVAIPPMPNRLDIPQGQPGYVPEHHRHGIKKFG |
| | | RVRKRYGVVPGRNRDADGKRTRQVLTEAGAAAKARDSVLA |
| | | VIRIGDDWTVVDLRGLLRNAQWRKLVPDGGITVQGLLDLFTG |
| | | DPVIDPRRGVVTFIYKADSVGIHSEKVCRGKQSKNLLERLCA |
| | | MPEKSSTRLDCARQAVALVSVDLGQRNPVAARFSRVSLAEG |
| | | QLQAQLVSAQFLDDAMVAMIRSYREEYDRFESLVREQAKAA |
| | | LSPEQLSEIVRHEADSAESVKSCVCAKFGIDPAGLSWDKMTSG |
| | | TWRIADHVQAAGGDVEWFFFKTCGKGKEIKTVRRSDFNVAK |
| | | QFRLRLSPETRKDWNDAIWELKRGNPAYVSFSKRKSEFARRV |
| | | VNDLVHRARRAVRCDEVVFAIEDLNISFFHGKGQRQMGWDA |
| | | FFEVKQENRWFIQALHKAFVERATHKGGYVLEVAPARTSTTC |
| | | PECRHCDPESRRGEQFCCIKCRHTCHADLEVATFNIEQVALTG |
| | | VSLPKRLSSTLL |
| CasΦ.28 | SEQ ID | MSKEKTPPSAYAILKAKHFPDLDFEKKHKMMAGRMFKNGAS |
| | NO: 301 | EQEVVQYLQGKGSESLMDVKPPAKSPILAQSRPFDEWEMVRT |
| | | SRLIQETIFGIPKRGSIPKRDGLSETQFNELVASLEVGGKPMLN |
| | | KQTRAIFYGLLGIKPPTFHAMAQNILIDLAINIRKGVLKKVDNL |
| | | NEKNRKKVKRIRDAGEQDVMVPAEVTAHDDRGYLNHPPGV |
| | | NPTIPGYQGVVIPFPEGFEGLPSGMTPVDWSHVLVDYLPHDRL |
| | | SIPKGSPGYIPEWQRPLLNRHKGRRHRSWYANSLNKPRKSRT |
| | | EEAKDRQNAGKRTALIEAERLKGVLPVLMRFKEDWLIIDARG |
| | | LLRNARYRGVLPEGSTLGNLIDLFSDSPRVDTRRGICTFLYRK |
| | | GRAYSTKPVKRKESKETLLKLTEKSTIALVSIDLGQTNPLTAK |
| | | LSKVRQVDGCLVAEPVLRKLIDNASEDGKEIARYRVAHDLLR |
| | | ARILEDAIDLLGIYKDEVVRARSDTPDLCKERVCRFLGLDSQA |
| | | IDWDRMTPYTDFIAQAFVAKGGDPKVVTIKPNGKPKMFRKD |
| | | RSIKNMKGIRLDISKEASSAYREAQWAIQRESPDFQRLAVWQS |
| | | QLTKRIVNQLVAWAKKCTQCDTVVLAFEDLNIGMMHGSGK |
| | | WANGGWNALFLHKQENRWFMQAFHKALTELSAHKGIPTIEV |
| | | LPHRTSITCTQCGHCHPGNRDGERFKCLKCEFLANTDLEIATD |
| | | NIERVALTGLPMPKGERSSAKRKPGGTRKTKKSKHSGNSPLA |
| | | AE |
| CasΦ.29 | SEQ ID | MEKAGPTSPLSVLIHKNFEGCRFQIDHLKIAGRKLAREGEAAA |
| | NO: 302 | IEYLLDKKCEGLPPNFQPPAKGNVIAQSRPFTEWAPYRASVAI |
| | | QKYIYSLSVDERKVCDPGSSSDSHEKWFKQTGVQNYGYTHV |
| | | QGLNLIFKHALARYDGVLKKVDNRNEKNRKKAERVNSFRRE |
| | | EGLPEEVFEEEKATDETGHLLQPPGVNHSIYCYQSVRPKPFNP |
| | | RKPGGISLPEAYSGYSLKPQDELPIGSLDRLSIPPGQPGYVPEW |
| | | QRSQLTTQKHRRKRSWYSAQKWKPRTGRTSTFDPDRLNCAR |
| | | AQGAILAVVRIHEDWVVFDVRGLLRNALWRELAGKGLTVRD |
| | | LLDFFTGDPVVDTKRGVVTFTYKLGKVDVHSLRTVRGKRSK |
| | | KVLEDLTLSSDVGLVTIDLGQTNVLAADYSKVTRSENGELLA |
| | | VPLSKSFLPKHLLHEVTAYRTSYDQMEEGFRRKALLTLTEDQ |
| | | QVEVTLVRDFSVESSKTKLLQLGVDVTSLPWEKMSSNTTYIS |
| | | DQLLQQGADPASLFFDGERDGKPCRHKKKDRTWAYLVRPKV |
| | | SPETRKALNEALWALKNTSPEFESLSKRKIQFSRRCMNYLLNE |
| | | AKRISGCGQVVFVIEDLNVRVHHGRGKRAIGWDNFFKPKREN |
| | | RWFMQALHKAASELAIHRGMHIIEACPARSSITCPKCGHCDPE |
| | | NRCSSDREKFLCVKCGAAFHADLEVATFNLRKVALTGTALPK |
| | | SIDHSRDGLIPKGARNRKLKEPQANDEKACA |
| CasΦ.30 | SEQ ID | MKEQSPLSSVLKSNFPGKKFLSADIRVAGRKLAQLGEAAAVE |
| | NO: 303 | YLSPRQRDSVPNFRPPAFCTVVAKSRPFEEWPIYKASVLLQEQ |
| | | IYGMTGQEFEERCGSIPTSLSGLRQWASSVGLGAAMEGLHVQ |
| | | GMNLMVKNAINRYKGVLVKVENRNKKLVEANEAKNSSREE |
| | | RGLPPLRPPELGSAFGPDGRLVNPPGIDKSIRLYQGVSPVPVVK |
| | | TTGRPTVHRLDIPAGEKGHVPLWQREAGLVKEGPRRRRMWY |
| | | SNSNLKRSRKDRSAEASEARKADSVVVRVSVKEDWVDIDVR |
| | | GLLRNVAWRGIERAGESTEDLLSLFSGDPVVDPSRDSVVFLY |
| | | KEGVVDVLSKKVVGAGKSRKQLEKMVSEGPVALVSCDLGQT |
| | | NYVAARVSVLDESLSPVRSFRVDPREFPSADGSQGVVGSLDRI |
| | | RADSDRLEAKLLSEAEASLPEPVRAEIEFLRSERPSAVAGRLCL |
| | | KLGIDPRSIPWEKMGSTTSFISEALSAKGSPLALHDGAPIKDSR |
| | | FAHAARGRLSPESRKALNEALWERKSSSREYGVISRRKSEASR |
| | | RMANAVLSESRRLTGLAVVAVNLEDLNMVSKFFHGRGKRAP |
| | | GWAGFFTPKMENRWFIRSIHKAMCDLSKHRGITVIESRPERTS |
| | | ISCPECGHCDPENRSGERFSCKSCGVSLHADFEVATRNLERVA |
| | | LTGKPMPRRENLHSPEGATASRKTRKKPREATASTFLDLRSVL |
| | | SSAENEGSGPAARAG |
| CasΦ.31 | SEQ ID | MLPPSNKIGKSMSLKEFINKRNFKSSIIKQAGKILKKEGEEAVK |
| | NO: 304 | KYLDDNYVEGYKKRDFPITAKCNIVASNRKIEDFDISKFSSFIQ |
| | | NYVFNLNKDNFEEFSKIKYNRKSFDELYKKIANEIGLEKPNYE |
| | | NIQGEIAVIRNAINIYNGVLKKVENRNKKIQEKNQSKDPPKLL |
| | | SAFDDNGFLAERPGINETIYGYQSVRLRHLDVEKDKDIIVQLP |
| | | DIYQKYNKKSTDKISVKKRLNKYNVDEYGKLISKRRKERINK |
| | | DDAILCVSNFGDDWIIFDARGLLRQTYRYKLKKKGLCIKDLL |
| | | NLFTGDPIINPTKTDLKEALSLSFKDGIINNRTLKVKNYKKCPE |
| | | LISELIRDKGKVAMISIDLGQTNPISYRLSKFTANNVAYIENGVI |
| | | SEDDIVKMKKWREKSDKLENLIKEEAIASLSDDEQREVRLYE |
| | | NDIADNTKKKILEKFNIREEDLDFSKMSNNTYFIRDCLKNKNI |
| | | DESEFTFEKNGKKLDPTDACFAREYKNKLSELTRKKINEKIWE |
| | | IKKNSKEYHKISIYKKETIRYIVNKLIKQSKEKSECDDIIVNIEK |
| | | LQIGGNFFGGRGKRDPGWNNFFLPKEENRWFINACHKAFSEL |
| | | APHKGIIVIESDPAYTSQTCPKCENCDKENRNGEKFKCKKCNY |
| | | EANADIDVATENLEKIAKNGRRLIKNFDQLGERLPGAEMPGG |
| | | ARKRKPSKSLPKNGRGAGVGSEPELINQSPSQVIA |
| CasΦ.32 | SEQ ID | VPDKKETPLVALCKKSFPGLRFKKHDSRQAGRILKSKGEGAA |
| | NO: 305 | VAFLEGKGGTTQPNFKPPVKCNIVAMSRPLEEWPIYKASVVIQ |
| | | KYVYAQSYEEFKATDPGKSEAGLRAWLKATRVDTDGYFNV |
| | | QGLNLIFQNARATYEGVLKKVENRNSKKVAKIEQRNEHRAER |
| | | GLPLLTLDEPETALDETGHLRHRPGINCSVFGYQHMKLKPYV |
| | | PGSIPGVTGYSRDPSTPIAACGVDRLEIPEGQPGYVPPWDREN |
| | | LSVKKHRRKRASWARSRGGAIDDNMLLAVVRVADDWALLD |
| | | LRGLLRNTQYRKLLDRSVPVTIESLLNLVTNDPTLSVVKKPGK |
| | | PVRYTATLIYKQGVVPVVKAKVVKGSYVSKMLDDTTETFSL |
| | | VGVDLGVNNLIAANALRIRPGKCVERLQAFTLPEQTVEDFFRF |
| | | RKAYDKHQENLRLAAVRSLTAEQQAEVLALDTFGPEQAKMQ |
| | | VCGHLGLSVDEVPWDKVNSRSSILSDLAKERGVDDTLYMFPF |
| | | FKGKGKKRKTEIRKRWDVNWAQHFRPQLTSETRKALNEAK |
| | | WEAERNSSKYHQLSIRKKELSRHCVNYVIRTAEKRAQCGKVI |
| | | VAVEDLHHSFRRGGKGSRKSGWGGFFAAKQEGRWLMDALF |
| | | GAFCDLAVHRGYRVIKVDPYNTSRTCPECGHCDKANRDRVN |
| | | REAFICVCCGYRGNADIDVAAYNIAMVAITGVSLRKAARASV |
| | | ASTPLESLAAE |
| CasΦ.33 | SEQ ID | MSKTKELNDYQEALARRLPGVRHQKSVRRAARLVYDRQGE |
| | NO: 306 | DAMVAFLDGKEVDEPYTLQPPAKCHILAVSRPIEEWPIARVT |
| | | MAVQEHVYALPVHEVEKSRPETTEGSRSAWFKNSGVSNHGV |
| | | THAQTLNAILKNAYNVYNGVIKKVENRNAKKRDSLAAKNKS |
| | | RERKGLPHFKADPPELATDEQGYLLQPPSPNSSVYLVQQHLR |
| | | TPQIDLPSGYTGPVVDPRSPIPSLIPIDRLAIPPGQPGYVPLHDR |
| | | EKLTSNKHRRMKLPKSLRAQGALPVCFRVFDDWAVVDGRGL |
| | | LRHAQYRRLAPKNVSIAELLELYTGDPVIDIKRNLMTFRFAEA |
| | | VVEVTARKIVEKYHNKYLLKLTEPKGKPVREIGLVSIDLNVQ |
| | | RLIALAIYRVHQTGESQLALSPCLHREILPAKGLGDFDKYKSK |
| | | FNQLTEEILTAAVQTLTSAQQEEYQRYVEESSHEAKADLCLK |
| | | YSITPHELAWDKMTSSTQYISRWLRDHGWNASDFTQITKGRK |
| | | KVERLWSDSRWAQELKPKLSNETRRKLEDAKHDLQRANPEW |
| | | QRLAKRKQEYSRHLANTVLSMAREYTACETVVIAIENLPMKG |
| | | GFVDGNGSRESGWDNFFTHKKENRWMIKDIHKALSDLAPNR |
| | | GVHVLEVNPQYTSQTCPECGHRDKANRDPIQRERFCCTHCGA |
| | | QRHADLEVATHNIAMVATTGKSLTGKSLAPQRLQEAAE |
| CasΦ.41 | SEQ ID | VLLSDRIQYTDPSAPIPAMTVVDRRKIKKGEPGYVPPFMRKNL |
| | NO: 307 | STNKHRRMRLSRGQKEACALPVGLRLPDGKDGWDFIIFDGRA |
| | | LLRACRRLRLEVTSMDDVLDKFTGDPRIQLSPAGETIVTCMLK |
| | | PQHTGVIQQKLITGKMKDRLVQLTAEAPIAMLTVDLGEHNLV |
| | | ACGAYTVGQRRGKLQSERLEAFLLPEKVLADFEGYRRDSDEH |
| | | SETLRHEALKALSKRQQREVLDMLRTGADQARESLCYKYGL |
| | | DLQALPWDKMSSNSTFIAQHLMSLGFGESATHVRYRPKRKAS |
| | | ERTILKYDSRFAAEEKIKLTDETRRAWNEAIWECQRASQEFRC |
| | | LSVRKLQLARAAVNWTLTQAKQRSRCPRVVVVVEDLNVRF |
| | | MHGGGKRQEGWAGFFKARSEKRWFIQALHKAYTELPTNRGI |
| | | HVMEVNPARTSITCTKCGYCDPENRYGEDFHCRNPKCKVRG |
| | | GHVANADLDIATENLARVALSGPMPKAPKLK |
| CasΦ.34 | SEQ ID | MTPSFGYQMIIVTPIHHASGAWATLRLLFLNPKTSGVMLGMT |
| | NO: 308 | KTKSAFALMREEVFPGLLFKSADLKMAGRKFAKEGREAAIEY |
| | | LRGKDEERPANFKPPAKGDIIAQSRPFDQWPIVQVSQAIQKYIF |
| | | GLTKAEFDATKTLLYGEGNHPTTESRRRWFEATGVPDFGFTS |
| | | AQGLNAIFSSALARYEGVIQKVENRNEKRLKKLSEKNQRLVE |
| | | EGHAVEAYVPETAFHTLESLKALSEKSLVPLDDLMDKIDRLA |
| | | QPPGINPCLYGYQQVAPYIYDPENPRGVVLPDLYLGYCRKPD |
| | | DPITACPNRLDIPKGQPGYIPEHQRGQLKKHGRVRRFRYTNPQ |
| | | AKARAKAQTAILAVLRIDEDWVVMDLRGLLRNVYFREVAAP |
| | | GELTARTLLDTFTGCPVLNLRSNVVTFCYDIESKGALHAEYV |
| | | RKGWATRNKLLDLTKDGQSVALLSVDLGQRHPVAVMISRLK |
| | | RDDKGDLSEKSIQVVSRTFADQYVDKLKRYRVQYDALRKEIY |
| | | DAALVSLPPEQQAEIRAYEAFAPGDAKANVLSVMFQGEVSPD |
| | | ELPWDKMNTNTHYISDLYLRRGGDPSRVFFVPQPSTPKKNAK |
| | | KPPAPRKPVKRTDENVSHMPEFRPHLSNETREAFQKAKWTM |
| | | ERGNVRYAQLSRFLNQIVREANNWLVSEAKKLTQCQTVVWA |
| | | IEDLHVPFFHGKGKYHETWDGFFRQKKEDRWFVNVFHKAISE |
| | | RAPNKGEYVMEVAPYRTSQRCPVCGFVDADNRHGDHFKCLR |
| | | CGVELHADLEVATWNIALVAVQGHGIAGPPREQSCGGETAG |
| | | TARKGKNIKKNKGLADAVTVEAQDSEGGSKKDAGTARNPVY |
| | | IPSESQVNCPAP |
| CasΦ.35 | SEQ ID | MKPKTPKPPKTPVAALIDKHFPGKRFRASYLKSVGKKLKNQG |
| | NO: 309 | EDVAVRFLTGKDEERPPNFQPPAKSNIVAQSRPIEEWPIHKVS |
| | | VAVQEYVYGLTVAEKEACSDAGESSSSHAAWFAKTGVENFG |
| | | YTSVQGLNKIFPPTFNRFDGVIKKVENRNEKKRQKATRINEAK |
| | | RNKGQSEDPPEAEVKATDDAGYLLQPPGINHSVYGYQSITLCP |
| | | YTAEKFPTIKLPEEYAGYHSNPDAPIPAGVPDRLAIPEGQPGH |
| | | VPEEHRAGLSTKKHRRVRQWYAMANWKPKPKRTSKPDYDR |
| | | LAKARAQGALLIVIRIDEDWVVVDARGLLRNVRWRSLGKREI |
| | | TPNELLDLFTGDPVLDLKRGVVTFTYAEGVVNVCSRSTTKGK |
| | | QTKVLLDAMTAPRDGKKRQIGMVAVDLGQTNPIAAEYSRVG |
| | | KNAAGTLEATPLSRSTLPDELLREIALYRKAHDRLEAQLREEA |
| | | VLKLTAEQQAENARYVETSEEGAKLALANLGVDTSTLPWDA |
| | | MTGWSTCISDHLINHGGDTSAVFFQTIRKGTKKLETIKRKDSS |
| | | WADIVRPRLTKETREALNDFLWELKRSHEGYEKLSKRLEELA |
| | | RRAVNHVVQEVKWLTQCQDIVIVIEDLNVRNFHGGGKRGGG |
| | | WSNFFTVKKENRWFMQALHKAFSDLAAHRGIPVLEVYPART |
| | | SITCLGCGHCDPENRDGEAFVCQQCGATFHADLEVATRNIAR |
| | | VALTGEAMPKAPAREQPGGAKKRGTSRRRKLTEVAVKSAEP |
| | | TIHQAKNQQLNGTSRDPVYKGSELPAL |
| CasΦ.43 | SEQ ID | MSEITDLLKANFKGKTFKSADMRMAGRILKKSGAQAVIKYLS |
| | NO: 310 | DKGAVDPPDFRPPAKCNIIAQSRPFDEWPICKASMAIQQHIYG |
| | | LTKNEFDESSPGTSSASHEQWFAKTGVDTHGFTHVQGLNLIF |
| | | QHAKKRYEGVIKKVENYNEKERKKFEGINERRSKEGMPLLEP |
| | | RLRTAFGDDGKFAEKPGVNPSIYLYQQTSPRPYDKTKHPYVH |
| | | APFELKEITTIPTQDDRLKIPFGAPGHVPEKHRSQLSMAKHKR |
| | | RRAWYALSQNKPRPPKDGSKGRRSVRDLADLKAASLADAIPL |
| | | VSRVGFDWVVIDGRGLLRNLRWRKLAHEGMTVEEMLGFFSG |
| | | DPVIDPRRNVATFIYKAEHATVKSRKPIGGAKRAREELLKATA |
| | | SSDGVIRQVGLISVDLGQTNPVAYEISRMHQANGELVAEHLE |
| | | YGLLNDEQVNSIQRYRAAWDSMNESFRQKAIESLSMEAQDEI |
| | | MQASTGAAKRTREAVLTMFGPNATLPWSRMSSNTTCISDALI |
| | | EVGKEEETNFVTSNGPRKRTDAQWAAYLRPRVNPETRALLN |
| | | QAVWDLMKRSDEYERLSKRKLEMARQCVNFVVARAEKLTQ |
| | | CNNIGIVLENLVVRNFHGSGRRESGWEGFFEPKRENRWFMQV |
| | | LHKAFSDLAQHRGVMVFEVHPAYSSQTCPACRYVDPKNRSS |
| | | EDRERFKCLKCGRSFNADREVATFNIREIARTGVGLPKPDCER |
| | | SRGVQTTGTARNPGRSLKSNKNPSEPKRVLQSKTRKKITSTET |
| | | QNEPLATDLKT |
| CasΦ.44 | SEQ ID | MTPKTESPLSALCKKHFPGKRFRTNYLKDAGKILKKHGEDAV |
| | NO: 311 | VAFLSDKQEDEPANFCPPAKVHILAQSRPFEDWPINLASKAIQ |
| | | TYVYGLTADERKTCEPGTSKESHDRWFKETGVDHHGFTSVQ |
| | | GLNLIFKHTLNRYDGVIKKVETRNEKRRSSVVRINEKKAAEG |
| | | LPLIAAEAEETAFGEDGRLLQPPGVNHSIYCFQQVSPQPYSSK |
| | | KHPQVVLPHAVQGVDPDAPIPVGRPNRLDIPKGQPGYVPEWQ |
| | | RPHLSMKCKRVRMWYARANWRRKPGRRSVLNEARLKEASA |
| | | KGALPIVLVIGDDWLVMDARGLLRSVFWRRVAKPGLSLSELL |
| | | NVTPTGLFSGDPVIDPKRGLVTFTSKLGVVAVHSRKPTRGKKS |
| | | KDLLLKMTKPTDDGMPRHVGMVAIDLGQTNPVAAEYSRVV |
| | | QSDAGTLKQEPVSRGVLPDDLLKDVARYRRAYDLTEESIRQE |
| | | AIALLSEGHRAEVTKLDQTTANETKRLLVDRGVSESLPWEKM |
| | | SSNTTYISDCLVALGKTDDVFFVPKAKKGKKETGIAVKRKDH |
| | | GWSKLLRPRTSPEARKALNENQWAVKRASPEYERLSRRKLEL |
| | | GRRCVNHIIQETKRWTQCEDIVVVLEDLNVGFFHGSGKRPDG |
| | | WDNFFVSKRENRWFIQVLHKAFGDLATHRGTHVIEVHPARTS |
| | | ITCIKCGHCDAGNRDGESFVCLASACGDRRHADLEVATRNVA |
| | | RVAITGERMPPSEQARDVQKAGGARKRKPSARNVKSSYPAV |
| | | EPAPASP |
| CasΦ.36 | SEQ ID | MSDNKMKKLSKEEKPLTPLQILIRKYIDKSQYPSGFKTTIIKQA |
| | NO: 312 | GVRIKSVKSEQDEINLANWIISKYDPTYIKRDFNPSAKCQIIATS |
| | | RSVADFDIVKMSNKVQEIFFASSHLDKNVFDIGKSKSDHDSW |
| | | FERNNVDRGIYTYSNVQGMNLIFSNTKNTYLGVAVKAQNKFS |
| | | SKMKRIQDINNFRITNHQSPLPIPDEIKIYDDAGFLLNPPGVNP |
| | | NIFGYQSCLLKPLENKEIISKTSFPEYSRLPADMIEVNYKISNRL |
| | | KFSNDQKGFIQFKDKLNLFKINSQELFSKRRRLSGQPILLVASF |
| | | GDDWVVLDGRGLLRQVYYRGIAKPGSITISELLGFFTGDPIVD |
| | | PIRGVVSLGFKPGVLSQETLKTTSARIFAEKLPNLVLNNNVGL |
| | | MSIDLGQTNPVSYRLSEITSNMSVEHICSDFLSQDQISSIEKAKT |
| | | SLDNLEEEIAIKAVDHLSDEDKINFANFSKLNLPEDTRQSLFEK |
| | | YPELIGSKLDFGSMGSGTSYIADELIKFENKDAFYPSGKKKFD |
| | | LSFSRDLRKKLSDETRKSYNDALFLEKRTNDKYLKNAKRRKQ |
| | | IVRTVANSLVSKIEELGLTPVINIENLAMSGGFFDGRGKREKG |
| | | WDNFFKVKKENRWVMKDFHKAFSELSPHHGVIVIESPPYCTS |
| | | VTCTKCNFCDKKNRNGHKFTCQRCGLDANADLDIATENLEK |
| | | VAISGKRMPGSERSSDERKVAVARKAKSPKGKAIKGVKCTIT |
| | | DEPALLSANSQDCSQSTS |
| CasΦ.37 | SEQ ID | MALSLAEVRERHFKGLRFRSSYLKRAGKILKKEGEAACVAYL |
| | NO: 313 | TGKDEESPPNFKPPAKCDVVAQSRPFEEWPIVQASVAVQSYV |
| | | YGLTKEAFEAFNPGTTKQSHEACLAATGIDTCGYSNVQGLNL |
| | | IFRQAKNRYEGVITKVENRNKKAKKKLTRKNEWRQKNGHSE |
| | | LPEAPEELTFNDEGRLLQPPGINPSLYTYQQISPTPWSPKDSSIL |
| | | PPQYAGYERDPNAPIPFGVAKDRLTIASGCPGYIPEWMRTAGE |
| | | KTNPRTQKKFMHPGLSTRKNKRMRLPRSVRSAPLGALLVTIH |
| | | LGEDWLVLDVRGLLRNARWRGVAPKDISTQGLLNLFTGDPVI |
| | | DTRRGVVTFTYKPETVGIHSRTWLYKGKQTKEVLEKLTQDQT |
| | | VALVAIDLGQTNPVSAAASRVSRSGENLSIETVDRFFLPDELIK |
| | | ELRLYRMAHDRLEERIREESTLALTEAQQAEVRALEHVVRDD |
| | | AKNKVCAAFNLDAASLPWDQMTSNTTYLSEAILAQGVSRDQ |
| | | VFFTPNPKKGSKEPVEVMRKDRAWVYAFKAKLSEETRKAKN |
| | | EALWALKRASPDYARLSKRREELCRRSVNMVINRAKKRTQC |
| | | QVVIPVLEDLNIGFFHGSGKRLPGWDNFFVAKKENRWLMNG |
| | | LHKSFSDLAVHRGFYVFEVMPHRTSITCPACGHCDSENRDGE |
| | | AFVCLSCKRTYHADLDVATHNLTQVAGTGLPMPEREHPGGT |
| | | KKPGGSRKPESPQTHAPILHRTDYSESADRLGS |
| CasΦ.45 | SEQ ID | QAVIKYLSDKGAVDPPDFRPPAKCNIIAQSRPFDEWPICKASM |
| | NO: 314 | AIQQHIYGLTKNEFDESSPGTSSASHEQWFAKTGVDTHGFTH |
| | | VQGLNLIFQHAKKRYEGVIKKVENYNEKERKKFEGINERRSK |
| | | EGMPLLEPRLRTAFGDDGKFAEKPGVNPSIYLYQQTSPRPYD |
| | | KTKHPYVHAPFELKEITTIPTQDDRLKIPFGAPGHVPEKHRSQL |
| | | SMAKHKRRRAWYALSQNKPRPPKDGSKGRRSVRDLADLKA |
| | | ASLADAIPLVSRVGFDWVVIDGRGLLRNLRWRKLAHEGMTV |
| | | EEMLGFFSGDPVIDPRRNVATFIYKAEHATVKSRKPIGGAKRA |
| | | REELLKATASSDGVIRQVGLISVDLGQTNPVAYEISRMHQAN |
| | | GELVAEHLEYGLLNDEQVNSIQRYRAAWDSMNESFRQKAIES |
| | | LSMEAQDEIMQASTGAAKRTREAVLTMFGPNATLPWSRMSS |
| | | NTTCISDALIEVGKEEETNFVTSNGPRKRTDAQWAAYLRPRV |
| | | NPETRALLNQAVWDLMKRSDEYERLSKRKLEMARQCVNFV |
| | | VARAEKLTQCNNIGIVLENLVVRNFHGSGRRESGWEGFFEPK |
| | | RENRWFMQVLHKAFSDLAQHRGVMVFEVHPAYSSQTCPACR |
| | | YVDPKNRSSEDRERFKCLKCGRSFNADREVATFNIREIARTGV |
| | | GLPKPDCERSRDVQTPGTARKSGRSLKSQDNLSEPKRVLQSK |
| | | TRKKITSTETQNEPLATDLKT |
| CasΦ.38 | SEQ ID | MIKEQSELSKLIEKYYPGKKFYSNDLKQAGKHLKKSEHLTAK |
| | NO: 315 | ESEELTVEFLKSCKEKLYDFRPPAKALIISTSRPFEEWPIYKASE |
| | | SIQKYIYSLTKEELEKYNISTDKTSQENFFKESLIDNYGFANVS |
| | | GLNLIFQHTKAIYDGVLKKVNNRNNKILKKYKRKIEEGIEIDSP |
| | | ELEKAIDESGHFINPPGINKNIYCYQQVSPTIFNSFKETKIICPFN |
| | | YKRNPNDIIQKGVIDRLAIPFGEPGYIPDHQRDKVNKHKKRIR |
| | | KYYKNNENKNKDAILAKINIGEDWVLFDLRGLLRNAYWRKL |
| | | IPKQGITPQQLLDMFSGDPVIDPIKNNITFIYKESIIPIHSESIIKTK |
| | | KSKELLEKLTKDEQIALVSIDLGQTNPVAARFSRLSSDLKPEH |
| | | VSSSFLPDELKNEICRYREKSDLLEIEIKNKAIKMLSQEQQDEI |
| | | KLVNDISSEELKNSVCKKYNIDNSKIPWDKMNGFTTFIADEFI |
| | | NNGGDKSLVYFTAKDKKSKKEKLVKLSDKKIANSFKPKISKE |
| | | TREILNKITWDEKISSNEYKKLSKRKLEFARRATNYLINQAKK |
| | | ATRLNNVVLVVEDLNSKFFHGSGKREDGWDNFFIPKKENRW |
| | | FIQALHKSLTDVSIHRGINVIEVRPERTSITCPKCGCCDKENRK |
| | | GEDFKCIKCDSVYHADLEVATFNIEKVAITGESMPKPDCERLG |
| | | GEESIG |
| CasΦ.39 | SEQ ID | VAFLDGKEVDEPYTLQPPAKCHILAVSRPIEEWPIARVTMAVQ |
| | NO: 316 | EHVYALPVHEVEKSRPETTEGSRSAWFKNSGVSNHGVTHAQ |
| | | TLNAILKNAYNVYNGVIKKVENRNAKKRDSLAAKNKSRERK |
| | | GLPHFKADPPELATDEQGYLLQPPSPNSSVYLVQQHLRTPQID |
| | | LPSGYTGPVVDPRSPIPSLIPIDRLAIPPGQPGYVPLHDREKLTS |
| | | NKHRRMKLPKSLRAQGALPVCFRVFDDWAVVDGRGLLRHA |
| | | QYRRLAPKNVSIAELLELYTGDPVIDIKRNLMTFRFAEAVVEV |
| | | TARKIVEKYHNKYLLKLTEPKGKPVREIGLVSIDLNVQRLIAL |
| | | AIYRVHQTGESQLALSPCLHREILPAKGLGDFDKYKSKFNQLT |
| | | EEILTAAVQTLTSAQQEEYQRYVEESSHEAKADLCLKYSITPH |
| | | ELAWDKMTSSTQYISRWLRDHGWNASDFTQITKGRKKVERL |
| | | WSDSRWAQELKPKLSNETRRKLEDAKHDLQRANPEWQRLA |
| | | KRKQEYSRHLANTVLSMAREYTACETVVIAIENLPMKGGFVD |
| | | GNGSRESGWDNFFTHKKENRWMIKDIHKALSDLAPNRGVHV |
| | | LEVNPQYTSQTCPECGHRDKANRDPIQRERFCCTHCGAQRHA |
| | | DLEVATHNIAMVATTGKSLTGKSLAPQRLQ |
| CasΦ.42 | SEQ ID | LEIPEGEPGHVPWFQRMDIPEGQIGHVNKIQRFNFVHGKNSGK |
| | NO: 317 | VKFSDKTGRVKRYHHSKYKDATKPYKFLEESKKVSALDSILA |
| | | IITIGDDWVVFDIRGLYRNVFYRELAQKGLTAVQLLDLFTGDP |
| | | VIDPKKGIITFSYKEGVVPVFSQKIVSRFKSRDTLEKLTSQGPV |
| | | ALLSVDLGQNEPVAARVCSLKNINDKIALDNSCRIPFLDDYKK |
| | | QIKDYRDSLDELEIKIRLEAINSLDVNQQVEIRDLDVFSADRAK |
| | | ASTVDMFDIDPNLISWDSMSDARFSTQISDLYLKNGGDESRV |
| | | YFEINNKRIKRSDYNISQLVRPKLSDSTRKNLNDSIWKLKRTSE |
| | | EYLKLSKRKLELSRAVVNYTIRQSKLLSGINDIVIILEDLDVKK |
| | | KFNGRGIRDIGWDNFFSSRKENRWFIPAFHKSFSELSSNRGLC |
| | | VIEVNPAWTSATCPDCGFCSKENRDGINFTCRKCGVSYHADI |
| | | DVATLNIARVAVLGKPMSGPADRERLGGTKKPRVARSRKDM |
| | | KRKDISNGTVEVMVTA |
| CasΦ.46 | SEQ ID | IPSFGYLDRLKIAKGQPGYIPEWQRETINPSKKVRRYWATNHE |
| | NO: 318 | KIRNAIPLVVFIGDDWVIIDGRGLLRDARRRKLADKNTTIEQL |
| | | LEMVSNDPVIDSTRGIATLSYVEGVVPVRSFIPIGEKKGREYLE |
| | | KSTQKESVTLLSVDIGQINPVSCGVYKVSNGCSKIDFLDKFFL |
| | | DKKHLDAIQKYRTLQDSLEASIVNEALDEIDPSFKKEYQNINS |
| | | QTSNDVKKSLCTEYNIDPEAISWQDITAHSTLISDYLIDNNITN |
| | | DVYRTVNKAKYKTNDFGWYKKFSAKLSKEAREALNEKIWEL |
| | | KIASSKYKKLSVRKKEIARTIANDCVKRAETYGDNVVVAMES |
| | | LTKNNKVMSGRGKRDPGWHNLGQAKVENRWFIQAISSAFED |
| | | KATHHGTPVLKVNPAYTSQTCPSCGHCSKDNRSSKDRTIFVC |
| | | KSCGEKFNADLDVATYNIAHVAFSGKKLSPPSEKSSATKKPRS |
| | | ARKSKKSRKS |
| CasΦ.47 | SEQ ID | SPIEKLLNGLLVKITFGNDWIICDARGLLDNVQKGIIHKSYFTN |
| | NO: 319 | KSSLVDLIDLFTCNPIVNYKNNVVTFCYKEGVVDVKSFTPIKS |
| | | GPKTQENLIKKLKYSRFQNEKDACVLGVGVDVGVTNPFAING |
| | | FKMPVDESSEWVMLNEPLFTIETSQAFREEIMAYQQRTDEMN |
| | | DQFNQQSIDLLPPEYKVEFDNLPEDINEVAKYNLLHTLNIPNN |
| | | FLWDKMSNTTQFISDYLIQIGRGTETEKTITTKKGKEKILTIRD |
| | | VNWFNTFKPKISEETGKARTEIKRDLQKNSDQFQKLAKSREQ |
| | | SCRTWVNNVTEEAKIKSGCPLIIFVIEALVKDNRVFSGKGHRA |
| | | IGWHNFGKQKNERRWWVQAIHKAFQEQGVNHGYPVILCPPQ |
| | | YTSQTCPKCNHVDRDNRSGEKFKCLKYGWIGNADLDVGAYN |
| | | IARVAITGKALSKPLEQKKIKKAKNKT |
| CasΦ.48 | SEQ ID | LLDNVQKGIIHKSYFTNKSSLVDLIDLFTCNPIVNYKNNVVTF |
| | NO: 320 | CYKEGVVDVKSFTPIKSGPKTQENLIKKLKYSRFQNEKDACV |
| | | LGVGVDVGVTNPFAINGFKMPVDESSEWVMLNEPLFTIETSQ |
| | | AFREEIMAYQQRTDEMNDQFNQQSIDLLPPEYKVEFDNLPEDI |
| | | NEVAKYNLLHTLNIPNNFLWDKMSNTTQFISDYLIQIGRGTET |
| | | EKTITTKKGKEKILTIRDVNWFNTFKPKISEETGKARTEIKRDL |
| | | QKNSDQFQKLAKSREQSCRTWVNNVTEEAKIKSGCPLIIFVIE |
| | | ALVKDNRVFSGKGHRAIGWHNFGKQKNERRWWVQAIHKAF |
| | | QEQGVNHGYPVILCPPQYTSQTCPKCNHVDRDNRSGEKFKCL |
| | | KYGWIGNADLDVGAYNIARVAITGKALSKPLEQKKIKKAKN |
| | | KT |
| CasΦ.49 | SEQ ID | MIKPTVSQFLTPGFKLIRNHSRTAGLKLKNEGEEACKKFVREN |
| | NO: 321 | EIPKDECPNFQGGPAIANIIAKSREFTEWEIYQSSLAIQEVIFTLP |
| | | KDKLPEPILKEEWRAQWLSEHGLDTVPYKEAAGLNLIIKNAV |
| | | NTYKGVQVKVDNKNKNNLAKINRKNEIAKLNGEQEISFEEIK |
| | | AFDDKGYLLQKPSPNKSIYCYQSVSPKPFITSKYHNVNLPEEYI |
| | | GYYRKSNEPIVSPYQFDRLRIPIGEPGYVPKWQYTFLSKKENK |
| | | RRKLSKRIKNVSPILGIICIKKDWCVFDMRGLLRTNHWKKYH |
| | | KPTDSINDLFDYFTGDPVIDTKANVVRFRYKMENGIVNYKPV |
| | | REKKGKELLENICDQNGSCKLATVDVGQNNPVAIGLFELKKV |
| | | NGELTKTLISRHPTPIDFCNKITAYRERYDKLESSIKLDAIKQLT |
| | | SEQKIEVDNYNNNFTPQNTKQIVCSKLNINPNDLPWDKMISGT |
| | | HFISEKAQVSNKSEIYFTSTDKGKTKDVMKSDYKWFQDYKPK |
| | | LSKEVRDALSDIEWRLRRESLEFNKLSKSREQDARQLANWISS |
| | | MCDVIGIENLVKKNNFFGGSGKREPGWDNFYKPKKENRWWI |
| | | NAIHKALTELSQNKGKRVILLPAMRTSITCPKCKYCDSKNRN |
| | | GEKFNCLKCGIELNADIDVATENLATVAITAQSMPKPTCERSG |
| | | DAKKPVRARKAKAPEFHDKLAPSYTVVLREAVKRPAATKK |
| | | AGQAKKKKEF |
| | | (Bold sequence is Nuclear Localization Signal) |

[0360] In some embodiments, any of the programmable CasΦ nuclease of the present disclosure (e.g., any one of SEQ ID NO: 274-SEQ ID NO: 321 or fragments or variants thereof) may include a nuclear localization signal (NLS). In some cases, said NLS may have a sequence of KRPAATKKAGQAKKKKEF (SEQ ID NO: 322).

[0361] A CasΦ polypeptide or a variant thereof can comprise at least 70%, at least 75%, at least 80%, at least 85%, at least 90%, at least 92%, at least 95%, at least 97%, at least 99%, or 100% sequence identity with any one of SEQ ID NO: 274-SEQ ID NO: 321.

[0362] In some embodiments, the Type VI CRISPR/Cas enzyme is a programmable Cas13 nuclease. The general architecture of a Cas13 protein includes an N-terminal domain and two HEPN (higher eukaryotes and prokaryotes nucleotide-binding) domains separated by two helical domains (Liu et al., Cell 2017 Jan. 12; 168(1-2):121-134.e12). The HEPN domains each comprise aR-X4-H motif. Shared features across Cas13 proteins include that upon binding of the crRNA of the guide nucleic acid to a target nucleic acid, the protein undergoes a conformational change to bring together the HEPN domains and form a catalytically active RNase. (Tambe et al., Cell Rep. 2018 Jul. 24; 24(4): 1025-1036.). Thus, two activatable HEPN domains are characteristic of a programmable Cas13 nuclease of the present disclosure. However, programmable Cas13 nucleases also consistent with the present disclosure include Cas13 nucleases comprising mutations in the HEPN domain that enhance the Cas13 proteins cleavage efficiency or mutations that catalytically inactivate the HEPN domains. Programmable Cas13 nucleases consistent with the present disclosure also Cas13 nucleases comprising catalytic

[0363] A programmable Cas13 nuclease can be a Cas13a protein (also referred to as “c2c2”), a Cas13b protein, a Cas13c protein, a Cas13d protein, or a Cas13e protein. Example C2c2 proteins are set forth as SEQ ID NO: 130-SEQ ID NO: 137. In some cases, a subject C2c2 protein includes an amino acid sequence having 80% or more (e.g., 85% or more, 90% or more, 95% or more, 98% or more, 99% or more, 99.5% or more, or 100%) amino acid sequence identity with the amino acid sequence set forth in any one of SEQ ID NOs: 130-SEQ ID NO: 137. In some cases, a suitable C2c2 polypeptide comprises an amino acid sequence having at least 80%, at least 85%, at least 90%, at least 95%, at least 98%, at least 99%, or 100%, amino acid sequence identity to the Listeria seeligeri C2c2 amino acid sequence set forth in SEQ ID NO: 130. In some cases, a suitable C2c2 polypeptide comprises an amino acid sequence having at least 80%, at least 85%, at least 90%, at least 95%, at least 98%, at least 99%, or 100%, amino acid sequence identity to the Leptotrichia buccalis C2c2 amino acid sequence set forth in SEQ ID NO: 131. In some cases, a suitable C2c2 polypeptide comprises an amino acid sequence having at least 80%, at least 85%, at least 90%, at least 95%, at least 98%, at least 99%, or 100%, amino acid sequence identity to the Rhodobacter capsulatus C2c2 amino acid sequence set forth in SEQ ID NO: 133. In some cases, a suitable C2c2 polypeptide comprises an amino acid sequence having at least 80%, at least 85%, at least 90%, at least 95%, at least 98%, at least 99%, or 100%, amino acid sequence identity to the Carnobacterium gallinarum C2c2 amino acid sequence set forth in SEQ ID NO: 134. In some cases, a suitable C2c2 polypeptide comprises an amino acid sequence having at least 80%, at least 85%, at least 90%, at least 95%, at least 98%, at least 99%, or 100%, amino acid sequence identity to the Herbinix hemicellulosilytica C2c2 amino acid sequence set forth in SEQ ID NO: 135. In some cases, the C2c2 protein includes an amino acid sequence having 80% or more amino acid sequence identity with the Leptotrichia buccalis (Lbu) C2c2 amino acid sequence set forth in SEQ ID NO: 131. In some cases, the C2c2 protein is a Leptotrichia buccalis (Lbu) C2c2 protein (e.g., see SEQ ID NO: 131). In some cases, the C2c2 protein includes the amino acid sequence set forth in any one of SEQ ID NOs: 130-131 and SEQ ID NOs: 133-137. In some cases, a C2c2 protein used in a method of the present disclosure is not a Leptotrichia shahii (Lsh) C2c2 protein. In some cases, a C2c2 protein used in a method of the present disclosure is not a C2c2 polypeptide having at least 80%, at least 85%, at least 90%, at least 95%, at least 98%, at least 99%, or 100%, amino acid sequence identity to the Lsh C2c2 polypeptide set forth in SEQ ID NO: 132. Other Cas13 protein sequences are set forth in SEQ ID NO: 130-SEQ ID NO: 147.

TABLE 4
Cas13 Protein Sequences

| SEQ | | |
|---|---|---|
| ID | | |
| NO | Description | Sequence |
| SEQ | Listeria | MWISIKTLIHHLGVLFFCDYMYNRREKKIIEVKTMRITKVEVDRKKV |
| ID | seeligeri C2c2 | LISRDKNGGKLVYENEMQDNTEQIMHHKKSSFYKSVVNKTICRPEQ |
| NO: | amino acid | KQMKKLVHGLLQENSQEKIKVSDVTKLNISNFLNHRFKKSLYYFPE |
| 130 | sequence | NSPDKSEEYRIEINLSQLLEDSLKKQQGTFICWESFSKDMELYINWA |
| | | ENYISSKTKLIKKSIRNNRIQSTESRSGQLMDRYMKDILNKNKPFDIQ |
| | | SVSEKYQLEKLTSALKATFKEAKKNDKEINYKLKSTLQNHERQIIEE |
| | | LKENSELNQFNIEIRKHLETYFPIKKTNRKVGDIRNLEIGEIQKIVNHR |
| | | LKNKIVQRILQEGKLASYEIESTVNSNSLQKIKIEEAFALKFINACLFA |
| | | SNNLRNMVYPVCKKDILMIGEFKNSFKEIKHKKFIRQWSQFFSQEIT |
| | | VDDIELASWGLRGAIAPIRNEIIHLKKHSWKKFFNNPTFKVKKSKIIN |
| | | GKTKDVTSEFLYKETLFKDYFYSELDSVPELIINKMESSKILDYYSSD |
| | | QLNQVFTIPNFELSLLTSAVPFAPSFKRVYLKGFDYQNQDEAQPDYN |
| | | LKLNIYNEKAFNSEAFQAQYSLFKMVYYQVFLPQFTTNNDLFKSSV |
| | | DFILTLNKERKGYAKAFQDIRKMNKDEKPSEYMSYIQSQLMLYQKK |
| | | QEEKEKINHFEKFINQVFIKGFNSFIEKNRLTYICHPTKNTVPENDNIE |
| | | IPFHTDMDDSNIAFWLMCKLLDAKQLSELRNEMIKFSCSLQSTEEIST |
| | | FTKAREVIGLALLNGEKGCNDWKELFDDKEAWKKNMSLYVSEELL |
| | | QSLPYTQEDGQTPVINRSIDLVKKYGTETILEKLFSSSDDYKVSAKDI |
| | | AKLHEYDVTEKIAQQESLHKQWIEKPGLARDSAWTKKYQNVINDIS |
| | | NYQWAKTKVELTQVRHLHQLTIDLLSRLAGYMSIADRDFQFSSNYI |
| | | LERENSEYRVTSWILLSENKNKNKYNDYELYNLKNASIKVSSKNDP |
| | | QLKVDLKQLRLTLEYLELFDNRLKEKRNNISHFNYLNGQLGNSILEL |
| | | FDDARDVLSYDRKLKNAVSKSLKEILSSHGMEVTFKPLYQTNHHLK |
| | | IDKLQPKKIHHLGEKSTVSSNQVSNEYCQLVRTLLTMK |
| SEQ | Leptotrichia | MKVTKVGGISHKKYTSEGRLVKSESEENRTDERLSALLNMRLDMYI |
| ID | buccalis (Lbu) | KNPSSTETKENQKRIGKLKKFFSNKMVYLKDNTLSLKNGKKENIDR |
| NO: | C2c2 amino | EYSETDILESDVRDKKNFAVLKKIYLNENVNSEELEVFRNDIKKKLN |
| 131 | acid sequence | KINSLKYSFEKNKANYQKINENNIEKVEGKSKRNIIYDYYRESAKRD |
| | | AYVSNVKEAFDKLYKEEDIAKLVLEIENLTKLEKYKIREFYHEIIGRK |
| | | NDKENFAKIIYEEIQNVNNMKELIEKVPDMSELKKSQVFYKYYLDK |
| | | EELNDKNIKYAFCHFVEIEMSQLLKNYVYKRLSNISNDKIKRIFEYQ |
| | | NLKKLIENKLLNKLDTYVRNCGKYNYYLQDGEIATSDFIARNRQNE |
| | | AFLRNIIGVSSVAYFSLRNILETENENDITGRMRGKTVKNNKGEEKY |
| | | VSGEVDKIYNENKKNEVKENLKMFYSYDFNMDNKNEIEDFFANIDE |
| | | AISSIRHGIVHFNLELEGKDIFAFKNIAPSEISKKMFQNEINEKKLKLK |
| | | IFRQLNSANVFRYLEKYKILNYLKRTRFEFVNKNIPFVPSFTKLYSRI |
| | | DDLKNSLGIYWKTPKTNDDNKTKEIIDAQIYLLKNIYYGEFLNYFMS |
| | | NNGNFFEISKEIIELNKNDKRNLKTGFYKLQKFEDIQEKIPKEYLANI |
| | | QSLYMINAGNQDEEEKDTYIDFIQKIFLKGFMTYLANNGRLSLIYIGS |
| | | DEETNTSLAEKKQEFDKFLKKYEQNNNIKIPYEINEFLREIKLGNILK |
| | | YTERLNMFYLILKLLNHKELTNLKGSLEKYQSANKEEAFSDQLELIN |
| | | LLNLDNNRVTEDFELEADEIGKFLDFNGNKVKDNKELKKFDTNKIY |
| | | FDGENIIKHRAFYNIKKYGMLNLLEKIADKAGYKISIEELKKYSNKK |
| | | NEIEKNHKMQENLHRKYARPRKDEKFTDEDYESYKQAIENIEEYTH |
| | | LKNKVEFNELNLLQGLLLRILHRLVGYTSIWERDLRFRLKGEFPENQ |
| | | YIEEIFNFENKKNVKYKGGQIVEKYIKFYKELHQNDEVKINKYSSAN |
| | | IKVLKQEKKDLYIRNYIAHFNYIPHAEISLLEVLENLRKLLSYDRKLK |
| | | NAVMKSVVDILKEYGFVATFKIGADKKIGIQTLESEKIVHLKNLKKK |
| | | KLMTDRNSEELCKLVKIMFEYKMEEKKSEN |
| SEQ | Leptotrichia | MGNLFGHKRWYEVRDKKDFKIKRKVKVKRNYDGNKYILNINENN |
| ID | shahii (Lsh) | NKEKIDNNKFIRKYINYKKNDNILKEFTRKFHAGNILFKLKGKEGIIR |
| NO: | C2c2 protein | IENNDDFLETEEVVLYIEAYGKSEKLKALGITKKKIIDEAIRQGITKD |
| 132 | | DKKIEIKRQENEEEIEIDIRDEYTNKTLNDCSIILRIIENDELETKKSIYE |
| | | IFKNINMSLYKIIEKIIENETEKVFENRYYEEHLREKLLKDDKIDVILT |
| | | NFMEIREKIKSNLEILGFVKFYLNVGGDKKKSKNKKMLVEKILNINV |
| | | DLTVEDIADFVIKELEFWNITKRIEKVKKVNNEFLEKRRNRTYIKSY |
| | | VLLDKHEKFKIERENKKDKIVKFFVENIKNNSIKEKIEKILAEFKIDEL |
| | | IKKLEKELKKGNCDTEIFGIFKKHYKVNFDSKKFSKKSDEEKELYKII |
| | | YRYLKGRIEKILVNEQKVRLKKMEKIEIEKILNESILSEKILKRVKQY |
| | | TLEHIMYLGKLRHNDIDMTTVNTDDFSRLHAKEELDLELITFFASTN |
| | | MELNKIFSRENINNDENIDFFGGDREKNYVLDKKILNSKIKIIRDLDFI |
| | | DNKNNITNNFIRKFTKIGTNERNRILHAISKERDLQGTQDDYNKVINI |
| | | IQNLKISDEEVSKALNLDVVFKDKKNIITKINDIKISEENNNDIKYLPS |
| | | FSKVLPEILNLYRNNPKNEPFDTIETEKIVLNALIYVNKELYKKLILE |
| | | DDLEENESKNIFLQELKKTLGNIDEIDENIIENYYKNAQISASKGNNK |
| | | AIKKYQKKVIECYIGYLRKNYEELFDFSDFKMNIQEIKKQIKDINDN |
| | | KTYERITVKTSDKTIVINDDFEYIISIFALLNSNAVINKIRNRFFATSV |
| | | WLNTSEYQNIIDILDEIMQLNTLRNECITENWNLNLEEFIQKMKEIEK |
| | | DFDDFKIQTKKEIFNNYYEDIKNNILTEFKDDINGCDVLEKKLEKIVI |
| | | FDDETKFEIDKKSNILQDEQRKLSNINKKDLKKKVDQYIKDKDQEIK |
| | | SKILCRIIFNSDFLKKYKKEIDNLIEDMESENENKFQEIYYPKERKNEL |
| | | YIYKKNLFLNIGNPNFDKIYGLISNDIKMADAKFLFNIDGKNIRKNKI |
| | | SEIDAILKNLNDKLNGYSKEYKEKYIKKLKENDDFFAKNIQNKNYK |
| | | SFEKDYNRVSEYKKIRDLVEFNYLNKIESYLIDINWKLAIQMARFER |
| | | DMHYIVNGLRELGIIKLSGYNTGISRAYPKRNGSDGFYTTTAYYKFF |
| | | DEESYKKFEKICYGFGIDLSENSEINKPENESIRNYISHFYIVRNPFAD |
| | | YSIAEQIDRVSNLLSYSTRYNNSTYASVFEVFKKDVNLDYDELKKKF |
| | | KLIGNNDILERLMKPKKVSVLELESYNSDYIKNLIIELLTKIENTNDT |
| | | L |
| SEQ | Rhodobacter | MQIGKVQGRTISEFGDPAGGLKRKISTDGKNRKELPAHLSSDPKALI |
| ID | capsulatus | GQWISGIDKIYRKPDSRKSDGKAIHSPTPSKMQFDARDDLGEAFWK |
| NO: | C2c2 amino | LVSEAGLAQDSDYDQFKRRLHPYGDKFQPADSGAKLKFEADPPEPQ |
| 133 | acid sequence | AFHGRWYGAMSKRGNDAKELAAALYEHLHVDEKRIDGQPKRNPK |
| | | TDKFAPGLVVARALGIESSVLPRGMARLARNWGEEEIQTYFVVDVA |
| | | ASVKEVAKAAVSAAQAFDPPRQVSGRSLSPKVGFALAEHLERVTGS |
| | | KRCSFDPAAGPSVLALHDEVKKTYKRLCARGKNAARAFPADKTEL |
| | | LALMRHTHENRVRNQMVRMGRVSEYRGQQAGDLAQSHYWTSAG |
| | | QTEIKESEIFVRLWVGAFALAGRSMKAWIDPMGKIVNTEKNDRDLT |
| | | AAVNIRQVISNKEMVAEAMARRGIYFGETPELDRLGAEGNEGFVFA |
| | | LLRYLRGCRNQTFHLGARAGFLKEIRKELEKTRWGKAKEAEHVVL |
| | | TDKTVAAIRAIIDNDAKALGARLLADLSGAFVAHYASKEHFSTLYSE |
| | | IVKAVKDAPEVSSGLPRLKLLLKRADGVRGYVHGLRDTRKHAFAT |
| | | KLPPPPAPRELDDPATKARYIALLRLYDGPFRAYASGITGTALAGPA |
| | | ARAKEAATALAQSVNVTKAYSDVMEGRSSRLRPPNDGETLREYLS |
| | | ALTGETATEFRVQIGYESDSENARKQAEFIENYRRDMLAFMFEDYIR |
| | | AKGFDWILKIEPGATAMTRAPVLPEPIDTRGQYEHWQAALYLVMH |
| | | FVPASDVSNLLHQLRKWEALQGKYELVQDGDATDQADARREALD |
| | | LVKRFRDVLVLFLKTGEARFEGRAAPFDLKPFRALFANPATFDRLF |
| | | MATPTTARP AEDDPEGDGASEPELRVARTLRGLRQIARYNHMAVLS |
| | | DLFAKHKVRDEEVARLAEIEDETQEKSQIVAAQELRTDLHDKVMK |
| | | CHPKTISPEERQSYAAAIKTIEEHRFLVGRVYLGDHLRLHRLMMDVI |
| | | GRLIDYAGAYERDTGTFLINASKQLGAGADWAVTIAGAANTDART |
| | | QTRKDLAHFNVLDRADGTPDLTALVNRAREMMAYDRKRKNAVPR |
| | | SILDMLARLGLTLKWQMKDHLLQDATITQAAIKHLDKVRLTVGGP |
| | | AAVTEARFSQDYLQMVAAVFNGSVQNPKPRRRDDGDAWHKPPKP |
| | | ATAQSQPDQKPPNKAPSAGSRLPPPQVGEVYEGVVVKVIDTGSLGF |
| | | LAVEGVAGNIGLHISRLRRIREDAIIVGRRYRFRVEIYVPPKSNTSKL |
| | | NAADLVRID |
| SEQ | Carnobacterium | MRITKVKIKLDNKLYQVTMQKEEKYGTLKLNEESRKSTAEILRLKK |
| ID | gallinarum | ASFNKSFHSKTINSQKENKNATIKKNGDYISQIFEKLVGVDTNKNIR |
| NO: | C2c2 amino | KPKMSLTDLKDLPKKDLALFIKRKFKNDDIVEIKNLDLISLFYNALQ |
| 134 | acid sequence | KVPGEHFTDESWADFCQEMMPYREYKNKFIERKIILLANSIEQNKGF |
| | | SINPETFSKRKRVLHQWAIEVQERGDFSILDEKLSKLAEIYNFKKMC |
| | | KRVQDELNDLEKSMKKGKNPEKEKEAYKKQKNFKIKTIWKDYPYK |
| | | THIGLIEKIKENEELNQFNIEIGKYFEHYFPIKKERCTEDEPYYLNSETI |
| | | ATTVNYQLKNALISYLMQIGKYKQFGLENQVLDSKKLQEIGIYEGF |
| | | QTKFMDACVFATSSLKNIIEPMRSGDILGKREFKEAIATSSFVNYHHF |
| | | FPYFPFELKGMKDRESELIPFGEQTEAKQMQNIWALRGSVQQIRNEI |
| | | FHSFDKNQKFNLPQLDKSNFEFDASENSTGKSQSYIETDYKFLFEAE |
| | | KNQLEQFFIERIKSSGALEYYPLKSLEKLFAKKEMKFSLGSQVVAFA |
| | | PSYKKLVKKGHSYQTATEGTANYLGLSYYNRYELKEESFQAQYYL |
| | | LKLIYQYVFLPNFSQGNSPAFRETVKAILRINKDEARKKMKKNKKFL |
| | | RKYAFEQVREMEFKETPDQYMSYLQSEMREEKVRKAEKNDKGFEK |
| | | NITMNFEKLLMQIFVKGFDVFLTTFAGKELLLSSEEKVIKETEISLSK |
| | | KINEREKTLKASIQVEHQLVATNSAISYWLFCKLLDSRHLNELRNEM |
| | | IKFKQSRIKFNHTQHAELIQNLLPIVELTILSNDYDEKNDSQNVDVSA |
| | | YFEDKSLYETAPYVQTDDRTRVSFRPILKLEKYHTKSLIEALLKDNP |
| | | QFRVAATDIQEWMHKREEIGELVEKRKNLHTEWAEGQQTLGAEKR |
| | | EEYRDYCKKIDRFNWKANKVTLTYLSQLHYLITDLLGRMVGFSALF |
| | | ERDLVYFSRSFSELGGETYHISDYKNLSGVLRLNAEVKPIKIKNIKVI |
| | | DNEENPYKGNEPEVKPFLDRLHAYLENVIGIKAVHGKIRNQTAHLS |
| | | VLQLELSMIESMNNLRDLMAYDRKLKNAVTKSMIKILDKHGMILKL |
| | | KIDENHKNFEIESLIPKEIIHLKDKAIKTNQVSEEYCQLVLALLTTNPG |
| | | NQLN |
| SEQ | Herbinix | MKLTRRRISGNSVDQKITAAFYRDMSQGLLYYDSEDNDCTDKVIES |
| ID | hemi- | MDFERSWRGRILKNGEDDKNPFYMFVKGLVGSNDKIVCEPIDVDSD |
| NO: | cellulosilytica | PDNLDILINKNLTGFGRNLKAPDSNDTLENLIRKIQAGIPEEEVLPEL |
| 135 | C2c2 | KKIKEMIQKDIVNRKEQLLKSIKNNRIPFSLEGSKLVPSTKKMKWLF |
| | amino acid | KLIDVPNKTFNEKMLEKYWEIYDYDKLKANITNRLDKTDKKARSIS |
| | sequence | RAVSEELREYHKNLRTNYNRFVSGDRPAAGLDNGGSAKYNPDKEE |
| | | FLLFLKEVEQYFKKYFPVKSKHSNKSKDKSLVDKYKNYCSYKVVK |
| | | KEVNRSIINQLVAGLIQQGKLLYYFYYNDTWQEDFLNSYGLSYIQV |
| | | EEAFKKSVMTSLSWGINRLTSFFIDDSNTVKFDDITTKKAKEAIESNY |
| | | FNKLRTCSRMQDHFKEKLAFFYPVYVKDKKDRPDDDIENLIVLVKN |
| | | AIESVSYLRNRTFHFKESSLLELLKELDDKNSGQNKIDYSVAAEFIKR |
| | | DIENLYDVFREQIRSLGIAEYYKADMISDCFKTCGLEFALYSPKNSL |
| | | MPAFKNVYKRGANLNKAYIRDKGPKETGDQGQNSYKALEEYRELT |
| | | WYIEVKNNDQSYNAYKNLLQLIYYHAFLPEVRENEALITDFINRTKE |
| | | WNRKETEERLNTKNNKKHKNFDENDDITVNTYRYESIPDYQGESLD |
| | | DYLKVLQRKQMARAKEVNEKEEGNNNYIQFIRDVVVWAFGAYLE |
| | | NKLKNYKNELQPPLSKENIGLNDTLKELFPEEKVKSPFNIKCRFSIST |
| | | FIDNKGKSTDNTSAEAVKTDGKEDEKDKKNIKRKDLLCFYLFLRLL |
| | | DENEICKLQHQFIKYRCSLKERRFPGNRTKLEKETELLAELEELMEL |
| | | VRFTMPSIPEISAKAESGYDTMIKKYFKDFIEKKVFKNPKTSNLYYH |
| | | SDSKTPVTRKYMALLMRSAPLHLYKDIFKGYYLITKKECLEYIKLSN |
| | | IIKDYQNSLNELHEQLERIKLKSEKQNGKDSLYLDKKDFYKVKEYV |
| | | ENLEQVARYKHLQHKINFESLYRIFRIHVDIAARMVGYTQDWERDM |
| | | HFLFKALVYNGVLEERRFEAIFNNNDDNNDGRIVKKIQNNLNNKNR |
| | | ELVSMLCWNKKLNKNEFGAIIWKRNPIAHLNHFTQTEQNSKSSLES |
| | | LINSLRILLAYDRKRQNAVTKTINDLLLNDYHIRIKWEGRVDEGQIY |
| | | FNIKEKEDIENEPIIHLKHLHKKDCYIYKNSYMFDKQKEWICNGIKEE |
| | | VYDKSILKCIGNLFKFDYEDKNKSSANPKHT |
| SEQ | Paludibacter | MRVSKVKVKDGGKDKMVLVHRKTTGAQLVYSGQPVSNETSNILPE |
| ID | propionicigenes | KKRQSFDLSTLNKTIIKFDTAKKQKLNVDQYKIVEKIFKYPKQELPK |
| NO: | C2c2 amino | QIKAEEILPFLNHKFQEPVKYWKNGKEESFNLTLLIVEAVQAQDKR |
| 136 | acid sequence | KLQPYYDWKTWYIQTKSDLLKKSIENNRIDLTENLSKRKKALLAWE |
| | | TEFTASGSIDLTHYHKVYMTDVLCKMLQDVKPLTDDKGKINTNAY |
| | | HRGLKKALQNHQPAIFGTREVPNEANRADNQLSIYHLEVVKYLEHY |
| | | FPIKTSKRRNTADDIAHYLKAQTLKTTIEKQLVNAIRANIIQQGKTNH |
| | | HELKADTTSNDLIRIKTNEAFVLNLTGTCAFAANNIRNMVDNEQTN |
| | | DILGKGDFIKSLLKDNTNSQLYSFFFGEGLSTNKAEKETQLWGIRGA |
| | | VQQIRNNVNHYKKDALKTVFNISNFENPTITDPKQQTNYADTIYKA |
| | | RFINELEKIPEAFAQQLKTGGAVSYYTIENLKSLLTTFQFSLCRSTIPF |
| | | APGFKKVFNGGINYQNAKQDESFYELMLEQYLRKENFAEESYNAR |
| | | YFMLKLIYNNLFLPGFTTDRKAFADSVGFVQMQNKKQAEKVNPRK |
| | | KEAYAFEAVRPMTAADSIADYMAYVQSELMQEQNKKEEKVAEET |
| | | RINFEKFVLQVFIKGFDSFLRAKEFDFVQMPQPQLTATASNQQKAD |
| | | KLNQLEASITADCKLTPQYAKADDATHIAFYVFCKLLDAAHLSNLR |
| | | NELIKFRESVNEFKFHHLLEIIEICLLSADVVPTDYRDLYSSEADCLA |
| | | RLRPFIEQGADITNWSDLFVQSDKHSPVIHANIELSVKYGTTKLLEQI |
| | | INKDTQFKTTEANFTAWNTAQKSIEQLIKQREDHHEQWVKAKNAD |
| | | DKEKQERKREKSNFAQKFIEKHGDDYLDICDYINTYNWLDNKMHF |
| | | VHLNRLHGLTIELLGRMAGFVALFDRDFQFFDEQQIADEFKLHGFV |
| | | NLHSIDKKLNEVPTKKIKEIYDIRNKIIQINGNKINESVRANLIQFISSK |
| | | RNYYNNAFLHVSNDEIKEKQMYDIRNHIAHFNYLTKDAADFSLIDLI |
| | | NELRELLHYDRKLKNAVSKAFIDLFDKHGMILKLKLNADHKLKVES |
| | | LEPKKIYHLGSSAKDKPEYQYCTNQVMMAYCNMCRSLLEMKK |
| SEQ | Leptotrichia | MYMKITKIDGVSHYKKQDKGILKKKWKDLDERKQREKIEARYNKQ |
| ID | wadei (Lwa) | IESKIYKEFFRLKNKKRIEKEEDQNIKSLYFFIKELYLNEKNEEWELK |
| NO: | C2c2 amino | NINLEILDDKERVIKGYKFKEDVYFFKEGYKEYYLRILFNNLIEKVQ |
| 137 | acid sequence | NENREKVRKNKEFLDLKEIFKKYKNRKIDLLLKSINNNKINLEYKKE |
| | | NVNEEIYGINPTNDREMTFYELLKEIIEKKDEQKSILEEKLDNFDITNF |
| | | LENIEKIFNEETEINIIKGKVLNELREYIKEKEENNSDNKLKQIYNLEL |
| | | KKYIENNFSYKKQKSKSKNGKNDYLYLNFLKKIMFIEEVDEKKEIN |
| | | KEKFKNKINSNFKNLFVQHILDYGKLLYYKENDEYIKNTGQLETKD |
| | | LEYIKTKETLIRKMAVLVSFAANSYYNLFGRVSGDILGTEVVKSSKT |
| | | NVIKVGSHIFKEKMLNYFFDFEIFDANKIVEILESISYSIYNVRNGVG |
| | | HFNKLILGKYKKKDINTNKRIEEDLNNNEEIKGYFIKKRGEIERKVK |
| | | EKFLSNNLQYYYSKEKIENYFEVYEFEILKRKIPFAPNFKRIIKKGED |
| | | LFNNKNNKKYEYFKNFDKNSAEEKKEFLKTRNFLLKELYYNNFYK |
| | | EFLSKKEEFEKIVLEVKEEKKSRGNINNKKSGVSFQSIDDYDTKINIS |
| | | DYIASIHKKEMERVEKYNEEKQKDTAKYIRDFVEEIFLTGFINYLEK |
| | | DKRLHFLKEEFSILCNNNNNVVDFNININEEKIKEFLKENDSKTLNLY |
| | | LFFNMIDSKRISEFRNELVKYKQFTKKRLDEEKEFLGIKIELYETLIEF |
| | | VILTREKLDTKKSEEIDAWLVDKLYVKDSNEYKEYEEILKLFVDEKI |
| | | LSSKEAPYYATDNKTPILLSNFEKTRKYGTQSFLSEIQSNYKYSKVE |
| | | KENIEDYNKKEEIEQKKKSNIEKLQDLKVELHKKWEQNKITEKEIEK |
| | | YNNTTRKINEYNYLKNKEELQNVYLLHEMLSDLLARNVAFFNKWE |
| | | RDFKFIVIAIKQFLRENDKEKVNEFLNPPDNSKGKKVYFSVSKYKNT |
| | | VENIDGIHKNFMNLIFLNNKFMNRKIDKMNCAIWVYFRNYIAHFLH |
| | | LHTKNEKISLISQMNLLIKLFSYDKKVQNHILKSTKTLLEKYNIQINF |
| | | EISNDKNEVFKYKIKNRLYSKKGKMLGKNNKFEILENEFLENVKAM |
| | | LEYSE |
| SEQ | Bergeyella | MENKTSLGNNIYYNPFKPQDKSYFAGYFNAAMENTDSVFRELGKR |
| ID | zoohelcum | LKGKEYTSENFFDAIFKENISLVEYERYVKLLSDYFPMARLLDKKEV |
| NO: | Cas13b | PIKERKENFKKNFKGIIKAVRDLRNFYTHKEHGEVEITDEIFGVLDE |
| 138 | | MLKSTVLTVKKKKVKTDKTKEILKKSIEKQLDILCQKKLEYLRDTA |
| | | RKIEEKRRNQRERGEKELVAPFKYSDKRDDLIAAIYNDAFDVYIDK |
| | | KKDSLKESSKAKYNTKSDPQQEEGDLKIPISKNGVVFLLSLFLTKQEI |
| | | HAFKSKIAGFKATVIDEATVSEATVSHGKNSICFMATHEIFSHLAYK |
| | | KLKRKVRTAEINYGEAENAEQLSVYAKETLMMQMLDELSKVPDVV |
| | | YQNLSEDVQKTFIEDWNEYLKENNGDVGTMEEEQVIHPVIRKRYED |
| | | KFNYFAIRFLDEFAQFPTLRFQVHLGNYLHDSRPKENLISDRRIKEKI |
| | | TVFGRLSELEHKKALFIKNTETNEDREHYWEIFPNPNYDFPKENISV |
| | | NDKDFPIAGSILDREKQPVAGKIGIKVKLLNQQYVSEVDKAVKAHQ |
| | | LKQRKASKPSIQNIIEEIVPINESNPKEAIVFGGQPTAYLSMNDIHSILY |
| | | EFFDKWEKKKEKLEKKGEKELRKEIGKELEKKIVGKIQAQIQQIIDK |
| | | DTNAKILKPYQDGNSTAIDKEKLIKDLKQEQNILQKLKDEQTVREKE |
| | | YNDFIAYQDKNREINKVRDRNHKQYLKDNLKRKYPEAPARKEVLY |
| | | YREKGKVAVWLANDIKRFMPTDFKNEWKGEQHSLLQKSLAYYEQ |
| | | CKEELKNLLPEKVFQHLPFKLGGYFQQKYLYQFYTCYLDKRLEYIS |
| | | GLVQQAENFKSENKVFKKVENECFKFLKKQNYTHKELDARVQSIL |
| | | GYPIFLERGFMDEKPTIIKGKTFKGNEALFADWFRYYKEYQNFQTFY |
| | | DTENYPLVELEKKQADRKRKTKIYQQKKNDVFTLLMAKHIFKSVFK |
| | | QDSIDQFSLEDLYQSREERLGNQERARQTGERNTNYIWNKTVDLKL |
| | | CDGKITVENVKLKNVGDFIKYEYDQRVQAFLKYEENIEWQAFLIKE |
| | | SKEEENYPYVVEREIEQYEKVRREELLKEVHLIEEYILEKVKDKEILK |
| | | KGDNQNFKYYILNGLLKQLKNEDVESYKVFNLNTEPEDVNINQLKQ |
| | | EATDLEQKAFVLTYIRNKFAHNQLPKKEFWDYCQEKYGKIEKEKTY |
| | | AEYFAEVFKKEKEALIK |
| SEQ | Prevotella | MEDDKKTTDSIRYELKDKHFWAAFLNLARHNVYITVNHINKILEEG |
| ID | intermedia | EINRDGYETTLKNTWNEIKDINKKDRLSKLIIKHFPFLEAATYRLNPT |
| NO: | Cas13b | DTTKQKEEKQAEAQSLESLRKSFFVFIYKLRDLRNHYSHYKHSKSLE |
| 139 | | RPKFEEGLLEKMYNIFNASIRLVKEDYQYNKDINPDEDFKHLDRTEE |
| | | EFNYYFTKDNEGNITESGLLFFVSLFLEKKDAIWMQQKLRGFKDNR |
| | | ENKKKMTNEVFCRSRMLLPKLRLQSTQTQDWILLDMLNELIRCPKS |
| | | LYERLREEDREKFRVPIEIADEDYDAEQEPFKNTLVRHQDRFPYFAL |
| | | RYFDYNEIFTNLRFQIDLGTYHFSIYKKQIGDYKESHHLTHKLYGFE |
| | | RIQEFTKQNRPDEWRKFVKTFNSFETSKEPYIPETTPHYHLENQKIGI |
| | | RFRNDNDKIWPSLKTNSEKNEKSKYKLDKSFQAEAFLSVHELLPMM |
| | | FYYLLLKTENTDNDNEIETKKKENKNDKQEKHKIEEIIENKITEIYAL |
| | | YDTFANGEIKSIDELEEYCKGKDIEIGHLPKQMIAILKDEHKVMATE |
| | | AERKQEEMLVDVQKSLESLDNQINEEIENVERKNSSLKSGKIASWL |
| | | VNDMMRFQPVQKDNEGKPLNNSKANSTEYQLLQRTLAFFGSEHER |
| | | LAPYFKQTKLIESSNPHPFLKDTEWEKCNNILSFYRSYLEAKKNFLES |
| | | LKPEDWEKNQYFLKLKEPKTKPKTLVQGWKNGFNLPRGIFTEPIRK |
| | | WFMKHRENITVAELKRVGLVAKVIPLFFSEEYKDSVQPFYNYHFNV |
| | | GNINKPDEKNFLNCEERRELLRKKKDEFKKMTDKEKEENPSYLEFK |
| | | SWNKFERELRLVRNQDIVTWLLCMELFNKKKIKELNVEKIYLKNIN |
| | | TNTTKKEKNTEEKNGEEKNIKEKNNILNRIMPMRLPIKVYGRENFSK |
| | | NKKKKIRRNTFFTVYIEEKGTKLLKQGNFKALERDRRLGGLFSFVKT |
| | | PSKAESKSNTISKLRVEYELGEYQKARIEIIKDMLALEKTLIDKYNSL |
| | | DTDNFNKMLTDWLELKGEPDKASFQNDVDLLIAVRNAFSHNQYPM |
| | | RNRIAFANINPFSLSSANTSEEKGLGIANQLKDKTHKTIEKIIEIEKPIE |
| | | TKE |
| SEQ | Prevotella | MQKQDKLFVDRKKNAIFAFPKYITIMENKEKPEPIYYELTDKHFWA |
| ID | buccae Cas13b | AFLNLARHNVYTTINHINRRLEIAELKDDGYMMGIKGSWNEQAKK |
| NO: | | LDKKVRLRDLIMKHFPFLEAAAYEMTNSKSPNNKEQREKEQSEALS |
| 140 | | LNNLKNVLFIFLEKLQVLRNYYSHYKYSEESPKPIFETSLLKNMYKV |
| | | FDANVRLVKRDYMHHENIDMQRDFTHLNRKKQVGRTKNIIDSPNF |
| | | HYHFADKEGNMTIAGLLFFVSLFLDKKDAIWMQKKLKGFKDGRNL |
| | | REQMTNEVFCRSRISLPKLKLENVQTKDWMQLDMLNELVRCPKSL |
| | | YERLREKDRESFKVPFDIFSDDYNAEEEPFKNTLVRHQDRFPYFVLR |
| | | YFDLNEIFEQLRFQIDLGTYHFSIYNKRIGDEDEVRHLTHHLYGFARI |
| | | QDFAPQNQPEEWRKLVKDLDHFETSQEPYISKTAPHYHLENEKIGIK |
| | | FCSAHNNLFPSLQTDKTCNGRSKFNLGTQFTAEAFLSVHELLPMMF |
| | | YYLLLTKDYSRKESADKVEGIIRKEISNIYAIYDAFANNEINSIADLTR |
| | | RLQNTNILQGHLPKQMISILKGRQKDMGKEAERKIGEMIDDTQRRL |
| | | DLLCKQTNQKIRIGKRNAGLLKSGKIADWLVNDMMRFQPVQKDQN |
| | | NIPINNSKANSTEYRMLQRALALFGSENFRLKAYFNQMNLVGNDNP |
| | | HPFLAETQWEHQTNILSFYRNYLEARKKYLKGLKPQNWKQYQHFLI |
| | | LKVQKTNRNTLVTGWKNSFNLPRGIFTQPIREWFEKHNNSKRIYDQI |
| | | LSFDRVGFVAKAIPLYFAEEYKDNVQPFYDYPFNIGNRLKPKKRQFL |
| | | DKKERVELWQKNKELFKNYPSEKKKTDLAYLDFLSWKKFERELRLI |
| | | KNQDIVTWLMFKELFNMATVEGLKIGEIHLRDIDTNTANEESNNILN |
| | | RIMPMKLPVKTYETDNKGNILKERPLATFYIEETETKVLKQGNFKAL |
| | | VKDRRLNGLFSFAETTDLNLEEHPISKLSVDLELIKYQTTRISIFEMTL |
| | | GLEKKLIDKYSTLPTDSFRNMLERWLQCKANRPELKNYVNSLIAVR |
| | | NAFSHNQYPMYDATLFAEVKKFTLFPSVDTKKIELNIAPQLLEIVGK |
| | | AIKEIEKSENKN |
| SEQ | Porphyromonas | MNTVPASENKGQSRTVEDDPQYFGLYLNLARENLIEVESHVRIKFG |
| ID | gingivalis | KKKLNEESLKQSLLCDHLLSVDRWTKVYGHSRRYLPFLHYFDPDSQ |
| NO: | Cas13b | IEKDHDSKTGVDPDSAQRLIRELYSLLDFLRNDFSHNRLDGTTFEHL |
| 141 | | EVSPDISSFITGTYSLACGRAQSRFAVFFKPDDFVLAKNRKEQLISVA |
| | | DGKECLTVSGFAFFICLFLDREQASGMLSRIRGFKRTDENWARAVH |
| | | ETFCDLCIRHPHDRLESSNTKEALLLDMLNELNRCPRILYDMLPEEE |
| | | RAQFLPALDENSMNNLSENSLDEESRLLWDGSSDWAEALTKRIRHQ |
| | | DRFPYLMLRFIEEMDLLKGIRFRVDLGEIELDSYSKKVGRNGEYDRT |
| | | ITDHALAFGKLSDFQNEEEVSRMISGEASYPVRFSLFAPRYAIYDNKI |
| | | GYCHTSDPVYPKSKTGEKRALSNPQSMGFISVHDLRKLLLMELLCE |
| | | GSFSRMQSDFLRKANRILDETAEGKLQFSALFPEMRHRFIPPQNPKS |
| | | KDRREKAETTLEKYKQEIKGRKDKLNSQLLSAFDMDQRQLPSRLLD |
| | | EWMNIRPASHSVKLRTYVKQLNEDCRLRLRKFRKDGDGKARAIPL |
| | | VGEMATFLSQDIVRMIISEETKKLITSAYYNEMQRSLAQYAGEENRR |
| | | QFRAIVAELRLLDPSSGHPFLSATMETAHRYTEGFYKCYLEKKREW |
| | | LAKIFYRPEQDENTKRRISVFFVPDGEARKLLPLLIRRRMKEQNDLQ |
| | | DWIRNKQAHPIDLPSHLFDSKVMELLKVKDGKKKWNEAFKDWWS |
| | | TKYPDGMQPFYGLRRELNIHGKSVSYIPSDGKKFADCYTHLMEKTV |
| | | RDKKRELRTAGKPVPPDLAADIKRSFHRAVNEREFMLRLVQEDDRL |
| | | MLMAINKMMTDREEDILPGLKNIDSILDEENQFSLAVHAKVLEKEG |
| | | EGGDNSLSLVPATIEIKSKRKDWSKYIRYRYDRRVPGLMSHFPEHK |
| | | ATLDEVKTLLGEYDRCRIKIFDWAFALEGAIMSDRDLKPYLHESSSR |
| | | EGKSGEHSTLVKMLVEKKGCLTPDESQYLILIRNKAAHNQFPCAAE |
| | | MPLIYRDVSAKVGSIEGSSAKDLPEGSSLVDSLWKKYEMIIRKILPIL |
| | | DPENRFFGKLLNNMSQPINDL |
| SEQ | Bacteroides | MESIKNSQKSTGKTLQKDPPYFGLYLNMALLNVRKVENHIRKWLG |
| ID | pyogenes | DVALLPEKSGFHSLLTTDNLSSAKWTRFYYKSRKFLPFLEMFDSDK |
| NO: | Cas13b | KSYENRRETAECLDTIDRQKISSLLKEVYGKLQDIRNAFSHYHIDDQ |
| 142 | | SVKHTALIISSEMHRFIENAYSFALQKTRARFTGVFVETDFLQAEEK |
| | | GDNKKFFAIGGNEGIKLKDNALIFLICLFLDREEAFKFLSRATGFKST |
| | | KEKGFLAVRETFCALCCRQPHERLLSVNPREALLMDMLNELNRCPD |
| | | ILFEMLDEKDQKSFLPLLGEEEQAHILENSLNDELCEAIDDPFEMIAS |
| | | LSKRVRYKNRFPYLMLRYIEEKNLLPFIRFRIDLGCLELASYPKKMG |
| | | EENNYERSVTDHAMAFGRLTDFHNEDAVLQQITKGITDEVRFSLYA |
| | | PRYAIYNNKIGFVRTSGSDKISFPTLKKKGGEGHCVAYTLQNTKSFG |
| | | FISIYDLRKILLLSFLDKDKAKNIVSGLLEQCEKHWKDLSENLFDAIR |
| | | TELQKEFPVPLIRYTLPRSKGGKLVSSKLADKQEKYESEFERRKEKL |
| | | TEILSEKDFDLSQIPRRMIDEWLNVLPTSREKKLKGYVETLKLDCRE |
| | | RLRVFEKREKGEHPLPPRIGEMATDLAKDIIRMVIDQGVKQRITSAY |
| | | YSEIQRCLAQYAGDDNRRHLDSIIRELRLKDTKNGHPFLGKVLRPGL |
| | | GHTEKLYQRYFEEKKEWLEATFYPAASPKRVPRFVNPPTGKQKELP |
| | | LIIRNLMKERPEWRDWKQRKNSHPIDLPSQLFENEICRLLKDKIGKE |
| | | PSGKLKWNEMFKLYWDKEFPNGMQRFYRCKRRVEVFDKVVEYEY |
| | | SEEGGNYKKYYEALIDEVVRQKISSSKEKSKLQVEDLTLSVRRVFKR |
| | | AINEKEYQLRLLCEDDRLLFMAVRDLYDWKEAQLDLDKIDNMLGE |
| | | PVSVSQVIQLEGGQPDAVIKAECKLKDVSKLMRYCYDGRVKGLMP |
| | | YFANHEATQEQVEMELRHYEDHRRRVFNWVFALEKSVLKNEKLRR |
| | | FYEESQGGCEHRRCIDALRKASLVSEEEYEFLVHIRNKSAHNQFPDL |
| | | EIGKLPPNVTSGFCECIWSKYKAIICRIIPFIDPERRFFGKLLEQK |
| SEQ | Cas13c | MTEKKSIIFKNKSSVEIVKKDIFSQTPDNMIRNYKITLKISEKNPRVVE |
| ID | | AEIEDLMNSTILKDGRRSARREKSMTERKLIEEKVAENYSLLANCPM |
| NO: | | EEVDSIKIYKIKRFLTYRSNMLLYFASINSFLCEGIKGKDNETEEIWH |
| 143 | | LKDNDVRKEKVKENFKNKLIQSTENYNSSLKNQIEEKEKLLRKESK |
| | | KGAFYRTIIKKLQQERIKELSEKSLTEDCEKIIKLYSELRHPLMHYDY |
| | | QYFENLFENKENSELTKNLNLDIFKSLPLVRKMKLNNKVNYLEDND |
| | | TLFVLQKTKKAKTLYQIYDALCEQKNGFNKFINDFFVSDGEENTVF |
| | | KQIINEKFQSEMEFLEKRISESEKKNEKLKKKFDSMKAHFHNINSED |
| | | TKEAYFWDIHSSSNYKTKYNERKNLVNEYTELLGSSKEKKLLREEIT |
| | | QINRKLLKLKQEMEEITKKNSLFRLEYKMKIAFGFLFCEFDGNISKF |
| | | KDEFDASNQEKIIQYHKNGEKYLTYFLKEEEKEKFNLEKMQKIIQKT |
| | | EEEDWLLPETKNNLFKFYLLTYLLLPYELKGDFLGFVKKHYYDIKN |
| | | VDFMDENQNNIQVSQTVEKQEDYFYHKIRLFEKNTKKYEIVKYSIV |
| | | PNEKLKQYFEDLGIDIKYLTGSVESGEKWLGENLGIDIKYLTVEQKS |
| | | EVSEEKIKKFL |
| SEQ | Cas13c | MEKDKKGEKIDISQEMIEEDLRKILILFSRLRHSMVHYDYEFYQALY |
| ID | | SGKDFVISDKNNLENRMISQLLDLNIFKELSKVKLIKDKAISNYLDK |
| NO: | | NTTIHVLGQDIKAIRLLDIYRDICGSKNGFNKFINTMITISGEEDREYK |
| 144 | | EKVIEHFNKKMENLSTYLEKLEKQDNAKRNNKRVYNLLKQKLIEQ |
| | | QKLKEWFGGPYVYDIHSSKRYKELYIERKKLVDRHSKLFEEGLDEK |
| | | NKKELTKINDELSKLNSEMKEMTKLNSKYRLQYKLQLAFGFILEEF |
| | | DLNIDTFINNFDKDKDLIISNFMKKRDIYLNRVLDRGDNRLKNIIKEY |
| | | KFRDTEDIFCNDRDNNLVKLYILMYILLPVEIRGDFLGFVKKNYYD |
| | | MKHVDFIDKKDKEDKDTFFHDLRLFEKNIRKLEITDYSLSSGFLSKE |
| | | HKVDIEKKINDFINRNGAMKLPEDITIEEFNKSLILPIMKNYQINFKLL |
| | | NDIEISALFKIAKDRSITFKQAIDEIKNEDIKKNSKKNDKNNHKDKNI |
| | | NFTQLMKRALHEKIPYKAGMYQIRNNISHIDMEQLYIDPLNSYMNS |
| | | NKNNITISEQIEKIIDVCVTGGVTGKELNNNIINDYYMKKEKLVFNL |
| | | KLRKQNDIVSIESQEKNKREEFVFKKYGLDYKDGEINIIEVIQKVNSL |
| | | QEELRNIKETSKEKLKNKETLFRDISLINGTIRKNINFKIKEMVLDIVR |
| | | MDEIRHINIHIYYKGENYTRSNIIKFKYAIDGENKKYYLKQHEINDIN |
| | | LELKDKFVTLICNMDKHPNKNKQTINLESNYIQNVKFIIP |
| SEQ | Cas13c | MENKGNNKKIDFDENYNILVAQIKEYFTKEIENYNNRIDNIIDKKEL |
| ID | | LKYSEKKEESEKNKKLEELNKLKSQKLKILTDEEIKADVIKIIKIFSDL |
| NO: | | RHSLMHYEYKYFENLFENKKNEELAELLNLNLFKNLTLLRQMKIEN |
| 145 | | KTNYLEGREEFNIIGKNIKAKEVLGHYNLLAEQKNGFNNFINSFFVQ |
| | | DGTENLEFKKLIDEHFVNAKKRLERNIKKSKKLEKELEKMEQHYQR |
| | | LNCAYVWDIHTSTTYKKLYNKRKSLIEEYNKQINEIKDKEVITAINV |
| | | ELLRIKKEMEEITKSNSLFRLKYKMQIAYAFLEIEFGGNIAKFKDEFD |
| | | CSKMEEVQKYLKKGVKYLKYYKDKEAQKNYEFPFEEIFENKDTHN |
| | | EEWLENTSENNLFKFYILTYLLLPMEFKGDFLGVVKKHYYDIKNVD |
| | | FTDESEKELSQVQLDKMIGDSFFHKIRLFEKNTKRYEIIKYSILTSDEI |
| | | KRYFRLLELDVPYFEYEKGTDEIGIFNKNIILTIFKYYQIIFRLYNDLEI |
| | | HGLFNISSDLDKILRDLKSYGNKNINFREFLYVIKQNNNSSTEEEYRK |
| | | IWENLEAKYLRLHLLTPEKEEIKTKTKEELEKLNEISNLRNGICHLNY |
| | | KEIIEEILKTEISEKNKEATLNEKIRKVINFIKENELDKVELGFNFINDF |
| | | FMKKEQFMFGQIKQVKEGNSDSITTERERKEKNNKKLKETYELNCD |
| | | NLSEFYETSNNLRERANSSSLLEDSAFLKKIGLYKVKNNKVNSKVK |
| | | DEEKRIENIKRKLLKDSSDIMGMYKAEVVKKLKEKLILIFKHDEEKR |
| | | IYVTVYDTSKAVPENISKEILVKRNNSKEEYFFEDNNKKYVTEYYTL |
| | | EITETNELKVIPAKKLEGKEFKTEKNKENKLMLNNHYCFNVKIIY |
| SEQ | Cas13c | MEEIKHKKNKSSIIRVIVSNYDMTGIKEIKVLYQKQGGVDTFNLKTII |
| ID | | NLESGNLEIISCKPKEREKYRYEFNCKTEINTISITKKDKVLKKEIRKY |
| NO: | | SLELYFKNEKKDTVVAKVTDLLKAPDKIEGERNHLRKLSSSTERKL |
| 146 | | LSKTLCKNYSEISKTPIEEIDSIKIYKIKRFLNYRSNFLIYFALINDFLC |
| | | AGVKEDDINEVWLIQDKEHTAFLENRIEKITDYIFDKLSKDIENKKN |
| | | QFEKRIKKYKTSLEELKTETLEKNKTFYIDSIKTKITNLENKITELSLY |
| | | NSKESLKEDLIKIISIFTNLRHSLMHYDYKSFENLFENIENEELKNLLD |
| | | LNLFKSIRMSDEFKTKNRTNYLDGTESFTIVKKHQNLKKLYTYYNN |
| | | LCDKKNGFNTFINSFFVTDGIENTDFKNLIILHFEKEMEEYKKSIEYY |
| | | KIKISNEKNKSKKEKLKEKIDLLQSELINMREHKNLLKQIYFFDIHNSI |
| | | KYKELYSERKNLIEQYNLQINGVKDVTAINHINTKLLSLKNKMDKIT |
| | | KQNSLYRLKYKLKIAYSFLMIEFDGDVSKFKNNFDPTNLEKRVEYL |
| | | DKKEEYLNYTAPKNKFNFAKLEEELQKIQSTSEMGADYLNVSPENN |
| | | LFKFYILTYIMLPVEFKGDFLGFVKNHYYNIKNVDFMDESLLDENEV |
| | | DSNKLNEKIENLKDSSFFNKIRLFEKNIKKYEIVKYSVSTQENMKEY |
| | | FKQLNLDIPYLDYKSTDEIGIFNKNMILPIFKYYQNVFKLCNDIEIHA |
| | | LLALANKKQQNLEYAIYCCSKKNSLNYNELLKTFNRKTYQNLSFIR |
| | | NKIAHLNYKELFSDLFNNELDLNTKVRCLIEFSQNNKFDQIDLGMNF |
| | | INDYYMKKTRFIFNQRRLRDLNVPSKEKIIDGKRKQQNDSNNELLK |
| | | KYGLSRTNIKDIFNKAWY |
| SEQ | Cas13c | MKVRYRKQAQLDTFIIKTEIVNNDIFIKSIIEKAREKYRYSFLFDGEE |
| ID | | KYHFKNKSSVEIVKNDIFSQTPDNMIRNYKITLKISEKNPRVVEAEIE |
| NO: | | DLMNSTILKDGRRSARREKSMTERKLIEEKVAENYSLLANCPIEEVD |
| 147 | | SIKIYKIKRFLTYRSNMLLYFASINSFLCEGIKGKDNETEEIWHLKDN |
| | | DVRKEKVKENFKNKLIQSTENYNSSLKNQIEEKEKLSSKEFKKGAFY |
| | | RTIIKKLQQERIKELSEKSLTEDCEKIIKLYSELRHPLMHYDYQYFEN |
| | | LFENKENSELTKNLNLDIFKSLPLVRKMKLNNKVNYLEDNDTLFVL |
| | | QKTKKAKTLYQIYDALCEQKNGFNKFINDFFVSDGEENTVFKQIINE |
| | | KFQSEMEFLEKRISESEKKNEKLKKKLDSMKAHFRNINSEDTKEAYF |
| | | WDIHSSRNYKTKYNERKNLVNEYTKLLGSSKEKKLLREEITKINRQL |
| | | LKLKQEMEEITKKNSLFRLEYKMKIAFGFLFCEFDGNISKFKDEFDA |
| | | SNQEKIIQYHKNGEKYLTSFLKEEEKEKFNLEKMQKIIQKTEEEDWL |
| | | LPETKNNLFKFYLLTYLLLPYELKGDFLGFVKKHYYDIKNVDFMDE |
| | | NQNNIQVSQTVEKQEDYFYHKIRLFEKNTKKYEIVKYSIVPNEKLKQ |
| | | YFEDLGIDIKYLTGSVESGEKWLGENLGIDIKYLTVEQKSEVSEEKN |
| | | KKVSLKNNGMFNKTILLFVFKYYQIAFKLFNDIELYSLFFLREKSEKP |
| | | FEVFLEELKDKMIGKQLNFGQLLYVVYEVLVKNKDLDKILSKKIDY |
| | | RKDKSFSPEIAYLRNFLSHLNYSKFLDNFMKINTNKSDENKEVLIPSI |
| | | KIQKMIQFIEKCNLQNQIDFDFNFVNDFYMRKEKMFFIQLKQIFPDIN |
| | | STEKQKKSEKEEILRKRYHLINKKNEQIKDEHEAQSQLYEKILSLQKI |
| | | FSCDKNNFYRRLKEEKLLFLEKQGKKKISMKEIKDKIASDISDLLGIL |
| | | KKEITRDIKDKLTEKFRYCEEKLLNISFYNHQDKKKEEGIRVFLIRDK |
| | | NSDNFKFESILDDGSNKIFISKNGKEITIQCCDKVLETLMIEKNTLKIS |
| | | SNGKIISLIPHYSYSIDVKY |

[0364] The programmable nuclease can be Cas13. Sometimes the Cas13 can be Cas13a, Cas13b, Cas13c, Cas13d, or Cas13e. In some cases, the programmable nuclease can be Mad7 or Mad2. In some cases, the programmable nuclease can be Cas12. Sometimes the Cas12 can be Cas12a, Cas12b, Cas12c, Cas12d, or Cas12e. In some cases, the programmable nuclease can be Csm1, Cas9, C2c4, C2c8, C2c5, C2c10, C2c9, or CasZ. Sometimes, the Csm1 can also be also called smCms1, miCms1, obCms1, or suCms1. Sometimes Cas13a can also be also called C2c2. Sometimes CasZ can also be called Cas14a, Cas14b, Cas14c, Cas14d, Cas14e, Cas14f, Cas14g, or Cas14h. Sometimes, the programmable nuclease can be a type V CRISPR-Cas system. In some cases, the programmable nuclease can be a type VI CRISPR-Cas system. Sometimes the programmable nuclease can be a type III CRISPR-Cas system. In some cases, the programmable nuclease can be from at least one of Leptotrichia shahii (Lsh), Listeria seeligeri (Lse), Leptotrichia buccalis (Lbu), Leptotrichia wadeu (Lwa), Rhodobacter capsulatus (Rca), Herbinix hemicellulosilytica (Hhe), Paludibacter propionicigenes (Ppr), Lachnospiraceae bacterium (Lba), [Eubacterium] rectale (Ere), Listeria newyorkensis (Lny), Clostridium aminophilum (Cam), Prevotella sp. (Psm), Capnocytophaga canimorsus (Cca, Lachnospiraceae bacterium (Lba), Bergeyella zoohelcum (Bzo), Prevotella intermedia (Pin), Prevotella buccae (Pbu), Alistipes sp. (Asp), Riemerella anatipestifer (Ran), Prevotella aurantiaca (Pau), Prevotella saccharolytica (Psa), Prevotella intermedia (Pint), Capnocytophaga canimorsus (Cca), Porphyromonas gulae (Pgu), Prevotella sp. (Psp), Porphyromonas gingivalis (Pig), Prevotella intermedia (Pin3), Enterococcus italicus (Ei), Lactobacillus salivarius (Ls), or Therms thermophilus (Tt). Sometimes the Cas13 is at least one of LbuCas13a, LwaCas13a, LbaCas13a, HheCas13a, PprCas13a, EreCas13a, CamCas13a, or LshCas13a. The trans cleavage activity of the CRISPR enzyme can be activated when the crRNA is complexed with the target nucleic acid. The trans cleavage activity of the CRISPR enzyme can be activated when the guide nucleic acid comprising a tracrRNA and crRNA are complexed with the target nucleic acid. The target nucleic acid can be RNA or DNA.

[0365] In some embodiments, a programmable nuclease as disclosed herein is an RNA-activated programmable RNA nuclease. In some embodiments, a programmable nuclease as disclosed herein is a DNA-activated programmable RNA nuclease. In some embodiments, a programmable nuclease is capable of being activated by a target RNA to initiate trans cleavage of an RNA reporter and is capable of being activated by a target DNA to initiate trans cleavage of an RNA reporter, such as a Type VI CRISPR/Cas enzyme (e.g., Cas13). For example, Cas13a of the present disclosure can be activated by a target RNA to initiate trans cleavage activity of the Cas13a for the cleavage of an RNA reporter and can be activated by a target DNA to initiate trans cleavage activity of the Cas13a for trans cleavage of an RNA reporter. An RNA reporter can be an RNA-based reporter molecule. In some embodiments, the Cas13a recognizes and detects ssDNA to initiate transcleavage of RNA reporters. Multiple Cas13a isolates can recognize, be activated by, and detect target DNA, including ssDNA, upon hybridization of a guide nucleic acid with the target DNA. For example, LbuCas13a and LwaCas13a can both be activated to transcollaterally cleave RNA reporters by target DNA. Thus, Type VI CRISPR/Cas enzyme (e.g., Cas13, such as Cas13a) can be DNA-activated programmable RNA nucleases, and therefore, can be used to detect a target DNA using the methods as described herein. DNA-activated programmable RNA nuclease detection of ssDNA can be robust at multiple pH values. For example, target ssDNA detection by Cas13 can exhibit consistent cleavage across a wide range of pH conditions, such as from a pH of 6.8 to a pH of 8.2. In contrast, target RNA detection by Cas13 may exhibit high cleavage activity of pH values from 7.9 to 8.2. In some embodiments, a DNA-activated programmable RNA nuclease that also is capable of being an RNA-activated programmable RNA nuclease, can have DNA targeting preferences that are distinct from its RNA targeting preferences. For example, the optimal ssDNA targets for Cas13a have different properties than optimal RNA targets for Cas13a. As one example, gRNA performance on ssDNA may not necessarily correlate with the performance of the same gRNAs on RNA. As another example, gRNAs can perform at a high level regardless of target nucleotide identity at a 3′ position on a target RNA sequence. In some embodiments, gRNAs can perform at a high level in the absence of a G at a 3′ position on a target ssDNA sequence. Furthermore, target DNA detected by Cas13 disclosed herein can be directly from organisms, or can be indirectly generated by nucleic acid amplification methods, such as PCR and LAMP or any amplification method described herein. Key steps for the sensitive detection of a target DNA, such as a target ssDNA, by a DNA-activated programmable RNA nuclease, such as Cas13a, can include: (1) production or isolation of DNA to concentrations above about 0.1 nM per reaction for in vitro diagnostics, (2) selection of a target sequence with the appropriate sequence features to enable DNA detection as these features are distinct from those required for RNA detection, and (3) buffer composition that enhances DNA detection. The detection of a target DNA by a DNA-activated programmable RNA nuclease can be connected to a variety of readouts including fluorescence, lateral flow, electrochemistry, or any other readouts described herein. Multiplexing of programmable DNA nuclease, such as a Type V CRISPR-Cas protein, with a DNA-activated programmable RNA nuclease, such as a Type VI protein, with a DNA reporter and an RNA reporter, can enable multiplexed detection of target ssDNAs or a combination of a target dsDNA and a target ssDNA, respectively. Multiplexing of different RNA-activated programmable RNA nucleases that have distinct RNA reporter cleavage preferences can enable additional multiplexing. Methods for the generation of ssDNA for DNA-activated programmable RNA nuclease-based diagnostics can include (1) asymmetric PCR, (2) asymmetric isothermal amplification, such as RPA, LAMP, SDA, etc. (3) NEAR for the production of short ssDNA molecules, and (4) conversion of RNA targets into ssDNA by a reverse transcriptase followed by RNase H digestion. Thus, DNA-activated programmable RNA nuclease detection of target DNA is compatible with the various systems, kits, compositions, reagents, and methods disclosed herein. For example target ssDNA detection by Cas13a can be employed in a DETECTR assay disclosed herein.

[0366] Described herein are reagents comprising a single stranded detector nucleic acid comprising a detection moiety, wherein the detector nucleic acid is capable of being cleaved by the activated nuclease, thereby generating a first detectable signal. As used herein, a detector nucleic acid is used interchangeably with reporter or reporter molecule. In some cases, the detector nucleic acid is a single-stranded nucleic acid comprising deoxyribonucleotides. In other cases, the detector nucleic acid is a single-stranded nucleic acid comprising ribonucleotides. The detector nucleic acid can be a single-stranded nucleic acid comprising at least one deoxyribonucleotide and at least one ribonucleotide. In some cases, the detector nucleic acid is a single-stranded nucleic acid comprising at least one ribonucleotide residue at an internal position that functions as a cleavage site. In some cases, the detector nucleic acid comprises at least 2, 3, 4, 5, 6, 7, 8, 9, or 10 ribonucleotide residues at an internal position. Sometimes the ribonucleotide residues are continuous. Alternatively, the ribonucleotide residues are interspersed in between non-ribonucleotide residues. In some cases, the detector nucleic acid has only ribonucleotide residues. In some cases, the detector nucleic acid has only deoxyribonucleotide residues. In some cases, the detector nucleic acid comprises nucleotides resistant to cleavage by the programmable nuclease described herein. In some cases, the detector nucleic acid comprises synthetic nucleotides. In some cases, the detector nucleic acid comprises at least one ribonucleotide residue and at least one non-ribonucleotide residue. In some cases, detector nucleic acid is 5-20, 5-15, 5-10, 7-20, 7-15, or 7-10 nucleotides in length. In some cases, the detector nucleic acid comprises at least one uracil ribonucleotide. In some cases, the detector nucleic acid comprises at least two uracil ribonucleotides. Sometimes the detector nucleic acid has only uracil ribonucleotides. In some cases, the detector nucleic acid comprises at least one adenine ribonucleotide. In some cases, the detector nucleic acid comprises at least two adenine ribonucleotide. In some cases, the detector nucleic acid has only adenine ribonucleotides. In some cases, the detector nucleic acid comprises at least one cytosine ribonucleotide. In some cases, the detector nucleic acid comprises at least two cytosine ribonucleotide. In some cases, the detector nucleic acid comprises at least one guanine ribonucleotide. In some cases, the detector nucleic acid comprises at least two guanine ribonucleotide. A detector nucleic acid can comprise only unmodified ribonucleotides, only unmodified deoxyribonucleotides, or a combination thereof. In some cases, the detector nucleic acid is from 5 to 12 nucleotides in length. In some cases, the detector nucleic acid is at least 2, 3, 4, 5, 6, 7, 8, 9, 10, 11, 12, 13, 14, 15, 16, 17, 18, 19, 20, 21, 22, 23, 24, 25, 26, 27, 28, 29, or 30 nucleotides in length. In some cases, the detector nucleic acid is 2, 3, 4, 5, 6, 7, 8, 9, 10, 11, 12, 13, 14, 15, 16, 17, 18, 19, 20, 21, 22, 23, 24, 25, 26, 27, 28, 29, or 30 nucleotides in length. For cleavage by a programmable nuclease comprising Cas13, a detector nucleic acid can be 5, 8, or 10 nucleotides in length. For cleavage by a programmable nuclease comprising Cas12, a detector nucleic acid can be 10 nucleotides in length.

[0367] The single stranded detector nucleic acid comprises a detection moiety capable of generating a first detectable signal. Sometimes the detector nucleic acid comprises a protein capable of generating a signal. A signal can be a calorimetric, potentiometric, amperometric, optical (e.g., fluorescent, colorometric, etc.), or piezo-electric signal. In some cases, a detection moiety is on one side of the cleavage site. Optionally, a quenching moiety is on the other side of the cleavage site. Sometimes the quenching moiety is a fluorescence quenching moiety. In some cases, the quenching moiety is 5′ to the cleavage site and the detection moiety is 3′ to the cleavage site. In some cases, the detection moiety is 5′ to the cleavage site and the quenching moiety is 3′ to the cleavage site. Sometimes the quenching moiety is at the 5′ terminus of the detector nucleic acid. Sometimes the detection moiety is at the 3′ terminus of the detector nucleic acid. In some cases, the detection moiety is at the 5′ terminus of the detector nucleic acid. In some cases, the quenching moiety is at the 3′ terminus of the detector nucleic acid. In some cases, the single-stranded detector nucleic acid is at least one population of the single-stranded nucleic acid capable of generating a first detectable signal. In some cases, the single-stranded detector nucleic acid is a population of the single stranded nucleic acid capable of generating a first detectable signal. Optionally, there is more than one population of single-stranded detector nucleic acid. In some cases, there are 2, 3, 4, 5, 6, 7, 8, 9, 10, 11, 12, 13, 14, 15, 20, 30, 40, 50, or greater than 50, or any number spanned by the range of this list of different populations of single-stranded detector nucleic acids capable of generating a detectable signal.

TABLE 5
Exemplary Single Stranded Detector Nucleic Acid

| 5′ Detection Moiety* | Sequence (SEQ ID NO:) | 3′ Quencher* |
|---|---|---|
| /56-FAM/ | rUrUrUrUrU (SEQ ID NO: 1) | /3IABkFQ/ |
| /5IRD700/ | rUrUrUrUrU (SEQ ID NO: 1) | /3IRQC1N/ |
| /5TYE665/ | rUrUrUrUrU (SEQ ID NO: 1) | /3IAbRQSp/ |
| /5Alex594N/ | rUrUrUrUrU (SEQ ID NO: 1) | /3IAbRQSp/ |
| /5ATTO633N/ | rUrUrUrUrU (SEQ ID NO: 1) | /3IAbRQSp/ |
| /56-FAM/ | rUrUrUrUrUrUrUrU (SEQ ID NO: 2) | /3IABkFQ/ |
| /5IRD700/ | rUrUrUrUrUrUrUrU (SEQ ID NO: 2) | /3IRQC1N/ |
| /5TYE665/ | rUrUrUrUrUrUrUrU (SEQ ID NO: 2) | /3IAbRQSp/ |
| /5Alex594N/ | rUrUrUrUrUrUrUrU (SEQ ID NO: 2) | /3IAbRQSp/ |
| /5ATTO633N/ | rUrUrUrUrUrUrUrU (SEQ ID NO: 2) | /3IAbRQSp/ |
| /56-FAM/ | rUrUrUrUrUrUrUrUrUrU (SEQ ID NO: 3) | /3IABkFQ/ |
| /5IRD700/ | rUrUrUrUrUrUrUrUrUrU (SEQ ID NO: 3) | /3IRQC1N/ |
| /5TYE665/ | rUrUrUrUrUrUrUrUrUrU (SEQ ID NO: 3) | /3IAbRQSp/ |
| /5Alex594N/ | rUrUrUrUrUrUrUrUrUrU (SEQ ID NO: 3) | /3IAbRQSp/ |
| /5ATTO633N/ | rUrUrUrUrUrUrUrUrUrU (SEQ ID NO: 3) | /3IAbRQSp/ |
| /56-FAM/ | TTTTrUrUTTTT (SEQ ID NO: 4) | /3IABkFQ/ |
| /5IRD700/ | TTTTrUrUTTTT (SEQ ID NO: 4) | /3IRQC1N/ |
| /5TYE665/ | TTTTrUrUTTTT (SEQ ID NO: 4) | /3IAbRQSp/ |
| /5Alex594N/ | TTTTrUrUTTTT (SEQ ID NO: 4) | /3IAbRQSp/ |
| /5ATTO633N/ | TTTTrUrUTTTT (SEQ ID NO: 4) | /3IAbRQSp/ |
| /56-FAM/ | TTrUrUTT (SEQ ID NO: 5) | /3IABkFQ/ |
| /5IRD700/ | TTrUrUTT (SEQ ID NO: 5) | /3IRQC1N/ |
| /5TYE665/ | TTrUrUTT (SEQ ID NO: 5) | /3IAbRQSp/ |
| /5Alex594N/ | TTrUrUTT (SEQ ID NO: 5) | /3IAbRQSp/ |
| /5ATTO633N/ | TTrUrUTT (SEQ ID NO: 5) | /3IAbRQSp/ |
| /56-FAM/ | TArArUGC (SEQ ID NO: 6) | /3IABkFQ/ |
| /5IRD700/ | TArArUGC (SEQ ID NO: 6) | /3IRQC1N/ |
| /5TYE665/ | TArArUGC (SEQ ID NO: 6) | /3IAbRQSp/ |
| /5Alex594N/ | TArArUGC (SEQ ID NO: 6) | /3IAbRQSp/ |
| /5ATTO633N/ | TArArUGC (SEQ ID NO: 6) | /3IAbRQSp/ |
| /56-FAM/ | TArUrGGC (SEQ ID NO: 7) | /3IABkFQ/ |
| /5IRD700/ | TArUrGGC (SEQ ID NO: 7) | /3IRQC1N/ |
| /5TYE665/ | TArUrGGC (SEQ ID NO: 7) | /3IAbRQSp/ |
| /5Alex594N/ | TArUrGGC (SEQ ID NO: 7) | /3IAbRQSp/ |
| /5ATTO633N/ | TArUrGGC (SEQ ID NO: 7) | /3IAbRQSp/ |
| /56-FAM/ | rUrUrUrUrU (SEQ ID NO: 8) | /3IABkFQ/ |
| /5IRD700/ | rUrUrUrUrU (SEQ ID NO: 8) | /3IRQC1N/ |
| /5TYE665/ | rUrUrUrUrU (SEQ ID NO: 8) | /3IAbRQSp/ |
| /5Alex594N/ | rUrUrUrUrU (SEQ ID NO: 8) | /3IAbRQSp/ |
| /5ATTO633N/ | rUrUrUrUrU (SEQ ID NO: 8) | /3IAbRQSp/ |
| /56-FAM/ | TTATTATT (SEQ ID NO: 9) | /3IABkFQ/ |
| /56-FAM/ | TTATTATT (SEQ ID NO: 9) | /3IABkFQ/ |
| /5IRD700/ | TTATTATT (SEQ ID NO: 9) | /3IRQC1N/ |
| /5TYE665/ | TTATTATT (SEQ ID NO: 9) | /3IAbRQSp/ |
| /5Alex594N/ | TTATTATT (SEQ ID NO: 9) | /3IAbRQSp/ |
| /5ATTO633N/ | TTATTATT (SEQ ID NO: 9) | /3IAbRQSp/ |
| /56-FAM/ | TTTTTT (SEQ ID NO: 10) | /3IABkFQ/ |
| /56-FAM/ | TTTTTTTT (SEQ ID NO: 11) | /3IABkFQ/ |
| /56-FAM/ | TTTTTTTTTT (SEQ ID NO: 12) | /3IABkFQ/ |
| /56-FAM/ | TTTTTTTTTTTT (SEQ ID NO: 13) | /3IABkFQ/ |
| /56-FAM/ | TTTTTTTTTTTTTT (SEQ ID NO: 14) | /3IABkFQ/ |
| /56-FAM/ | AAAAAA (SEQ ID NO: 15) | /3IABkFQ/ |
| /56-FAM/ | CCCCCC (SEQ ID NO: 16) | /3IABkFQ/ |
| /56-FAM/ | GGGGGG (SEQ ID NO: 17) | /3IABkFQ/ |
| /56-FAM/ | TTATTATT (SEQ ID NO: 9) | /3IABkFQ/ |

/56-FAM/: 5′ 6-Fluorescein (Integrated DNA Technologies)
/3IABkFQ/: 3′ Iowa Black FQ (Integrated DNA Technologies)
/5IRD700/: 5′ IRDye 700 (Integrated DNA Technologies)
/5TYE665/: 5′ TYE 665 (Integrated DNA Technologies)
/5Alex594N/: 5′ Alexa Fluor 594 (NHS Ester) (Integrated DNA Technologies)
/5ATTO633N/: 5′ ATTO TM 633 (NHS Ester) (Integrated DNA Technologies)
/3IRQC1N/: 3′ IRDye QC-1 Quencher (Li-Cor)
/3IAbRQSp/: 3′ Iowa Black RQ (Integrated DNA Technologies)
rU: uracil ribonucleotide
rG: guanine ribonucleotide
*This Table refers to the detection moiety and quencher moiety as their tradenames and their source is identified. However, alternatives, generics, or non-tradename moieties with similar function from other sources can also be used.

[0368] A detection moiety can be an infrared fluorophore. A detection moiety can be a fluorophore that emits fluorescence in the range of from 500 nm and 720 nm. A detection moiety can be a fluorophore that emits fluorescence in the range of from 500 nm and 720 nm. In some cases, the detection moiety emits fluorescence at a wavelength of 700 nm or higher. In other cases, the detection moiety emits fluorescence at about 660 nm or about 670 nm. In some cases, the detection moiety emits fluorescence at in the range of from 500 to 520, 500 to 540, 500 to 590, 590 to 600, 600 to 610, 610 to 620, 620 to 630, 630 to 640, 640 to 650, 650 to 660, 660 to 670, 670 to 680, 6890 to 690, 690 to 700, 700 to 710, 710 to 720, or 720 to 730 nm. A detection moiety can be a fluorophore that emits a fluorescence in the same range as 6-Fluorescein, IRDye 700, TYE 665, Alex Fluor, or ATTO TM 633 (NHS Ester). A detection moiety can be fluorescein amidite, 6-Fluorescein, IRDye 700, TYE 665, Alex Fluor 594, or ATTO TM 633 (NHS Ester). A detection moiety can be a fluorophore that emits a fluorescence in the same range as 6-Fluorescein (Integrated DNA Technologies), IRDye 700 (Integrated DNA Technologies), TYE 665 (Integrated DNA Technologies), Alex Fluor 594 (Integrated DNA Technologies), or ATTO TM 633 (NHS Ester) (Integrated DNA Technologies). A detection moiety can be fluorescein amidite, 6-Fluorescein (Integrated DNA Technologies), IRDye 700 (Integrated DNA Technologies), TYE 665 (Integrated DNA Technologies), Alex Fluor 594 (Integrated DNA Technologies), or ATTO TM 633 (NHS Ester) (Integrated DNA Technologies). Any of the detection moieties described herein can be from any commercially available source, can be an alternative with a similar function, a generic, or a non-tradename of the detection moieties listed.

[0369] A detection moiety can be chosen for use based on the type of sample to be tested. For example, a detection moiety that is an infrared fluorophore is used with a urine sample. As another example, SEQ ID NO: 1 with a fluorophore that emits around 520 nm is used for testing in non-urine samples, and SEQ ID NO: 8 with a fluorophore that emits a fluorescence around 700 nm is used for testing in urine samples.

[0370] A quenching moiety can be chosen based on its ability to quench the detection moiety. A quenching moiety can be a non-fluorescent fluorescence quencher. A quenching moiety can quench a detection moiety that emits fluorescence in the range of from 500 nm and 720 nm. A quenching moiety can quench a detection moiety that emits fluorescence in the range of from 500 nm and 720 nm. In some cases, the quenching moiety quenches a detection moiety that emits fluorescence at a wavelength of 700 nm or higher. In other cases, the quenching moiety quenches a detection moiety that emits fluorescence at about 660 nm or about 670 nm. In some cases, the quenching moiety quenches a detection moiety emits fluorescence at in the range of from 500 to 520, 500 to 540, 500 to 590, 590 to 600, 600 to 610, 610 to 620, 620 to 630, 630 to 640, 640 to 650, 650 to 660, 660 to 670, 670 to 680, 6890 to 690, 690 to 700, 700 to 710, 710 to 720, or 720 to 730 nm. A quenching moiety can quench fluorescein amidite, 6-Fluorescein, IRDye 700, TYE 665, Alex Fluor 594, or ATTO TM 633 (NHS Ester). A quenching moiety can be Iowa Black RQ, Iowa Black FQ or IRDye QC-1 Quencher. A quenching moiety can quench fluorescein amidite, 6-Fluorescein (Integrated DNA Technologies), IRDye 700 (Integrated DNA Technologies), TYE 665 (Integrated DNA Technologies), Alex Fluor 594 (Integrated DNA Technologies), or ATTO TM 633 (NHS Ester) (Integrated DNA Technologies). A quenching moiety can be Iowa Black RQ (Integrated DNA Technologies), Iowa Black FQ (Integrated DNA Technologies) or IRDye QC-1 Quencher (LiCor). Any of the quenching moieties described herein can be from any commercially available source, can be an alternative with a similar function, a generic, or a non-tradename of the quenching moieties listed.

[0371] The generation of the detectable signal from the release of the detection moiety indicates that cleavage by the programmable nuclease has occurred and that the sample contains the target nucleic acid. In some cases, the detection moiety comprises a fluorescent dye. Sometimes the detection moiety comprises a fluorescence resonance energy transfer (FRET) pair. In some cases, the detection moiety comprises an infrared (IR) dye. In some cases, the detection moiety comprises an ultraviolet (UV) dye. Alternatively or in combination, the detection moiety comprises a polypeptide. Sometimes the detection moiety comprises a biotin. Sometimes the detection moiety comprises at least one of avidin or streptavidin. In some instances, the detection moiety comprises a polysaccharide, a polymer, or a nanoparticle. In some instances, the detection moiety comprises a gold nanoparticle or a latex nanoparticle.

[0372] A detection moiety can be any moiety capable of generating a calorimetric, potentiometric, amperometric, optical (e.g., fluorescent, colorimetric, etc.), or piezo-electric signal. A detector nucleic acid, sometimes, is protein-nucleic acid that is capable of generating a calorimetric, potentiometric, amperometric, optical (e.g., fluorescent, colorimetric, etc.), or piezo-electric signal upon cleavage of the nucleic acid. A protein-nucleic acid may comprise a nucleic acid component and a protein or peptide component. In some embodiments, a protein-nucleic acid may comprise a nucleic acid fused to a protein or peptide. Often a calorimetric signal is heat produced after cleavage of the detector nucleic acids. Sometimes, a calorimetric signal is heat absorbed after cleavage of the detector nucleic acids. A potentiometric signal, for example, is electrical potential produced after cleavage of the detector nucleic acids. An amperometric signal can be movement of electrons produced after the cleavage of detector nucleic acid. Often, the signal is an optical signal, such as a colorimetric signal or a fluorescence signal. An optical signal is, for example, a light output produced after the cleavage of the detector nucleic acids. Sometimes, an optical signal is a change in light absorbance between before and after the cleavage of detector nucleic acids. Often, a piezo-electric signal is a change in mass between before and after the cleavage of the detector nucleic acid.

[0373] Often, the protein-nucleic acid is an enzyme-nucleic acid. The enzyme may be sterically hindered when present as in the enzyme-nucleic acid, but then functional upon cleavage from the nucleic acid. Often, the enzyme is an enzyme that produces a reaction with a substrate. An enzyme can be invertase. Often, the substrate of invertase is sucrose and DNS reagent.

[0374] Sometimes the protein-nucleic acid is a substrate-nucleic acid. Often the substrate is a substrate that produces a reaction with an enzyme.

[0375] A protein-nucleic acid may be attached to a solid support. The solid support, for example, is a surface. A surface can be an electrode. Sometimes the solid support is a bead. Often the bead is a magnetic bead. Upon cleavage, the protein is liberated from the solid and interacts with other mixtures. For example, the protein is an enzyme, and upon cleavage of the nucleic acid of the enzyme-nucleic acid, the enzyme flows through a chamber into a mixture comprising the substrate. When the enzyme meets the enzyme substrate, a reaction occurs, such as a colorimetric reaction, which is then detected. As another example, the protein is an enzyme substrate, and upon cleavage of the nucleic acid of the enzyme substrate-nucleic acid, the enzyme flows through a chamber into a mixture comprising the enzyme. When the enzyme substrate meets the enzyme, a reaction occurs, such as a calorimetric reaction, which is then detected.

[0376] In some embodiments, the reporter comprises a nucleic acid conjugated to an affinity molecule and the affinity molecule conjugated to the fluorophore (e.g., nucleic acid—affinity molecule—fluorophore) or the nucleic acid conjugated to the fluorophore and the fluorophore conjugated to the affinity molecule (e.g., nucleic acid—fluorophore—affinity molecule). In some embodiments, a linker conjugates the nucleic acid to the affinity molecule. In some embodiments, a linker conjugates the affinity molecule to the fluorophore. In some embodiments, a linker conjugates the nucleic acid to the fluorophore. A linker can be any suitable linker known in the art. In some embodiments, the nucleic acid of the reporter can be directly conjugated to the affinity molecule and the affinity molecule can be directly conjugated to the fluorophore or the nucleic acid can be directly conjugated to the fluorophore and the fluorophore can be directly conjugated to the affinity molecule. In this context, “directly conjugated” indicated that no intervening molecules, polypeptides, proteins, or other moieties are present between the two moieties directly conjugated to each other. For example, if a reporter comprises a nucleic acid directly conjugated to an affinity molecule and an affinity molecule directly conjugated to a fluorophore—no intervening moiety is present between the nucleic acid and the affinity molecule and no intervening moiety is present between the affinity molecule and the fluorophore. The affinity molecule can be biotin, avidin, streptavidin, or any similar molecule.

[0377] In some cases, the reporter comprises a substrate-nucleic acid. The substrate may be sequestered from its cognate enzyme when present as in the substrate-nucleic acid, but then is released from the nucleic acid upon cleavage, wherein the released substrate can contact the cognate enzyme to produce a detectable signal. Often, the substrate is sucrose and the cognate enzyme is invertase, and a DNS reagent can be used to monitor invertase activity.

[0378] A major advantage of the devices and methods disclosed herein is the design of excess reporters to total nucleic acids in an unamplified or an amplified sample, not including the nucleic acid of the reporter. Total nucleic acids can include the target nucleic acids and non-target nucleic acids, not including the nucleic acid of the reporter. The non-target nucleic acids can be from the original sample, either lysed or unlysed. The non-target nucleic acids can also be byproducts of amplification. Thus, the non-target nucleic acids can include both non-target nucleic acids from the original sample, lysed or unlysed, and from an amplified sample. The presence of a large amount of non-target nucleic acids, an activated programmable nuclease may be inhibited in its ability to bind and cleave the reporter sequences. This is because the activated programmable nucleases collaterally cleaves any nucleic acids. If total nucleic acids are in present in large amounts, they may outcompete reporters for the programmable nucleases. The devices and methods disclosed herein are designed to have an excess of reporter to total nucleic acids, such that the detectable signals from cleavage reactions (e.g., DETECTR reactions) are particularly superior. In some embodiments, the reporter can be present in at least 1.5 fold, at least 2 fold, at least 3 fold, at least 4 fold, at least 5 fold, at least 6 fold, at least 7 fold, at least 8 fold, at least 9 fold, at least 10 fold, at least 11 fold, at least 12 fold, at least 13 fold, at least 14 fold, at least 15 fold, at least 16 fold, at least 17 fold, at least 18 fold, at least 19 fold, at least 20 fold, at least 30 fold, at least 40 fold, at least 50 fold, at least 60 fold, at least 70 fold, at least 80 fold, at least 90 fold, at least 100 fold, from 1.5 fold to 100 fold, from 2 fold to 10 fold, from 10 fold to 20 fold, from 20 fold to 30 fold, from 30 fold to 40 fold, from 40 fold to 50 fold, from 50 fold to 60 fold, from 60 fold to 70 fold, from 70 fold to 80 fold, from 80 fold to 90 fold, from 90 fold to 100 fold, from 1.5 fold to 10 fold, from 1.5 fold to 20 fold, from 10 fold to 40 fold, from 20 fold to 60 fold, or from 10 fold to 80 fold excess of total nucleic acids.

[0379] A second significant advantage of the devices and methods disclosed herein is the design of an excess volume comprising the guide nucleic acid, the programmable nuclease, and the reporter, which contacts a smaller volume comprising the sample with the target nucleic acid of interest. The smaller volume comprising the sample can be unlysed sample, lysed sample, or lysed sample which has undergone any combination of reverse transcription, amplification, and in vitro transcription. The presence of various reagents in a crude, non-lysed sample, a lysed sample, or a lysed and amplified sample, such as buffer, magnesium sulfate, salts, the pH, a reducing agent, primers, dNTPs, NTPs, cellular lysates, non-target nucleic acids, primers, or other components, can inhibit the ability of the programmable nuclease to find and cleave the nucleic acid of the reporter. This may be due to nucleic acids that are not the reporter, which outcompete the nucleic acid of the reporter, for the programmable nuclease. Alternatively, various reagents in the sample may simply inhibit the activity of the programmable nuclease. Thus, the devices and methods provided herein for contacting an excess volume comprising the guide nucleic acid, the programmable nuclease, and the reporter to a smaller volume comprising the sample with the target nucleic acid of interest provides for superior detection of the target nucleic acid by ensuring that the programmable nuclease is able to find and cleaves the nucleic acid of the reporter. In some embodiments, the volume comprising the guide nucleic acid, the programmable nuclease, and the reporter (can be referred to as “a second volume”) is 4-fold greater than a volume comprising the sample (can be referred to as “a first volume”). In some embodiments, the volume comprising the guide nucleic acid, the programmable nuclease, and the reporter (can be referred to as “a second volume”) is at least 1.5 fold, at least 2 fold, at least 3 fold, at least 4 fold, at least 5 fold, at least 6 fold, at least 7 fold, at least 8 fold, at least 9 fold, at least 10 fold, at least 11 fold, at least 12 fold, at least 13 fold, at least 14 fold, at least 15 fold, at least 16 fold, at least 17 fold, at least 18 fold, at least 19 fold, at least 20 fold, at least 30 fold, at least 40 fold, at least 50 fold, at least 60 fold, at least 70 fold, at least 80 fold, at least 90 fold, at least 100 fold, from 1.5 fold to 100 fold, from 2 fold to 10 fold, from 10 fold to 20 fold, from 20 fold to 30 fold, from 30 fold to 40 fold, from 40 fold to 50 fold, from 50 fold to 60 fold, from 60 fold to 70 fold, from 70 fold to 80 fold, from 80 fold to 90 fold, from 90 fold to 100 fold, from 1.5 fold to 10 fold, from 1.5 fold to 20 fold, from 10 fold to 40 fold, from 20 fold to 60 fold, or from 10 fold to 80 fold greater than a volume comprising the sample (can be referred to as “a first volume”). In some embodiments, the volume comprising the sample is at least 0.5 ul, at least 1 ul, at least at least 1 uL, at least 2 uL, at least 3 uL, at least 4 uL, at least 5 uL, at least 6 uL, at least 7 uL, at least 8 uL, at least 9 uL, at least 10 uL, at least 11 uL, at least 12 uL, at least 13 uL, at least 14 uL, at least 15 uL, at least 16 uL, at least 17 uL, at least 18 uL, at least 19 uL, at least 20 uL, at least 25 uL, at least 30 uL, at least 35 uL, at least 40 uL, at least 45 uL, at least 50 uL, at least 55 uL, at least 60 uL, at least 65 uL, at least 70 uL, at least 75 uL, at least 80 uL, at least 85 uL, at least 90 uL, at least 95 uL, at least 100 uL, from 0.5 uL to 5 ul uL, from 5 uL to 10 uL, from 10 uL to 15 uL, from 15 uL to 20 uL, from 20 uL to 25 uL, from 25 uL to 30 uL, from 30 uL to 35 uL, from 35 uL to 40 uL, from 40 uL to 45 uL, from 45 uL to 50 uL, from 10 uL to 20 uL, from 5 uL to 20 uL, from 1 uL to 40 uL, from 2 uL to 10 uL, or from 1 uL to 10 uL. In some embodiments, the volume comprising the programmable nuclease, the guide nucleic acid, and the reporter is at least 10 uL, at least 11 uL, at least 12 uL, at least 13 uL, at least 14 uL, at least 15 uL, at least 16 uL, at least 17 uL, at least 18 uL, at least 19 uL, at least 20 uL, at least 21 uL, at least 22 uL, at least 23 uL, at least 24 uL, at least 25 uL, at least 26 uL, at least 27 uL, at least 28 uL, at least 29 uL, at least 30 uL, at least 40 uL, at least 50 uL, at least 60 uL, at least 70 uL, at least 80 uL, at least 90 uL, at least 100 uL, at least 150 uL, at least 200 uL, at least 250 uL, at least 300 uL, at least 350 uL, at least 400 uL, at least 450 uL, at least 500 uL, from 10 uL to 15 ul uL, from 15 uL to 20 uL, from 20 uL to 25 uL, from 25 uL to 30 uL, from 30 uL to 35 uL, from 35 uL to 40 uL, from 40 uL to 45 uL, from 45 uL to 50 uL, from 50 uL to 55 uL, from 55 uL to 60 uL, from 60 uL to 65 uL, from 65 uL to 70 uL, from 70 uL to 75 uL, from 75 uL to 80 uL, from 80 uL to 85 uL, from 85 uL to 90 uL, from 90 uL to 95 uL, from 95 uL to 100 uL, from 100 uL to 150 uL, from 150 uL to 200 uL, from 200 uL to 250 uL, from 250 uL to 300 uL, from 300 uL to 350 uL, from 350 uL to 400 uL, from 400 uL to 450 uL, from 450 uL to 500 uL, from 10 uL to 20 uL, from 10 uL to 30 uL, from 25 uL to 35 uL, from 10 uL to 40 uL, from 20 uL to 50 uL, from 18 uL to 28 uL, or from 17 uL to 22 uL.

[0380] A reporter may be a hybrid nucleic acid reporter. A hybrid nucleic acid reporter comprises a nucleic acid with at least one deoxyribonucleotide and at least one ribonucleotide. In some embodiments, the nucleic acid of the hybrid nucleic acid reporter can be of any length and can have any mixture of DNAs and RNAs. For example, in some cases, longer stretches of DNA can be interrupted by a few ribonucleotides. Alternatively, longer stretches of RNA can be interrupted by a few deoxyribonucleotides. Alternatively, every other base in the nucleic acid may alternate between ribonucleotides and deoxyribonucleotides. A major advantage of the hybrid nucleic acid reporter is increased stability as compared to a pure RNA nucleic acid reporter. For example, a hybrid nucleic acid reporter can be more stable in solution, lyophilized, or vitrified as compared to a pure DNA or pure RNA reporter.

[0381] The reporter can be lyophilized or vitrified. The reporter can be suspended in solution or immobilized on a surface. For example, the reporter can be immobilized on the surface of a chamber in a device as disclosed herein. In some cases, the reporter is immobilized on beads, such as magnetic beads, in a chamber of a device as disclosed herein where they are held in position by a magnet placed below the chamber.

[0382] Additionally, target nucleic acid can be amplified before binding to the crRNA of the CRISPR enzyme. This amplification can be PCR amplification or isothermal amplification. This nucleic acid amplification of the sample can improve at least one of sensitivity, specificity, or accuracy of the detection the target RNA. The reagents for nucleic acid amplification can comprise a recombinase, an oligonucleotide primer, a single-stranded DNA binding (SSB) protein, and a polymerase. The nucleic acid amplification can be transcription mediated amplification (TMA). Nucleic acid amplification can be helicase dependent amplification (HDA) or circular helicase dependent amplification (cHDA). In additional cases, nucleic acid amplification is strand displacement amplification (SDA). The nucleic acid amplification can be recombinase polymerase amplification (RPA). The nucleic acid amplification can be at least one of loop mediated amplification (LAMP) or the exponential amplification reaction (EXPAR). Nucleic acid amplification is, in some cases, by rolling circle amplification (RCA), ligase chain reaction (LCR), simple method amplifying RNA targets (SMART), single primer isothermal amplification (SPIA), multiple displacement amplification (MDA), nucleic acid sequence based amplification (NASBA), hinge-initiated primer-dependent amplification of nucleic acids (HIP), nicking enzyme amplification reaction (NEAR), or improved multiple displacement amplification (IMDA). The nucleic acid amplification can be performed for no greater than 1, 2, 3, 4, 5, 6, 7, 8, 9, 10, 11, 12, 13, 14, 15, 16, 17, 18, 19, 20, 25, 30, 40, 50, or 60 minutes. Sometimes, the nucleic acid amplification reaction is performed at a temperature of around 20-45° C. The nucleic acid amplification reaction can be performed at a temperature no greater than 20° C., 25° C., 30° C., 35° C., 37° C., 40° C., 45° C. The nucleic acid amplification reaction can be performed at a temperature of at least 20° C., 25° C., 30° C., 35° C., 37° C., 40° C., or 45° C.

[0383] Disclosed herein are methods of assaying for a target nucleic acid as described herein wherein a signal is detected. For example, a method of assaying for a target nucleic acid in a sample comprises contacting the sample to a complex comprising a guide nucleic acid comprising a segment that is reverse complementary to a segment of the target nucleic acid and a programmable nuclease that exhibits sequence independent cleavage upon forming a complex comprising the segment of the guide nucleic acid binding to the segment of the target nucleic acid; and assaying for a signal indicating cleavage of at least some protein-nucleic acids of a population of protein-nucleic acids, wherein the signal indicates a presence of the target nucleic acid in the sample and wherein absence of the signal indicates an absence of the target nucleic acid in the sample. As another example, a method of assaying for a target nucleic acid in a sample, for example, comprises: a) contacting the sample to a complex comprising a guide nucleic acid comprising a segment that is reverse complementary to a segment of the target nucleic acid and a programmable nuclease that exhibits sequence independent cleavage upon forming a complex comprising the segment of the guide nucleic acid binding to the segment of the target nucleic acid; b) contacting the complex to a substrate; c) contacting the substrate to a reagent that differentially reacts with a cleaved substrate; and d) assaying for a signal indicating cleavage of the substrate, wherein the signal indicates a presence of the target nucleic acid in the sample and wherein absence of the signal indicates an absence of the target nucleic acid in the sample. Often, the substrate is an enzyme-nucleic acid. Sometimes, the substrate is an enzyme substrate-nucleic acid.

[0384] A programmable nuclease can comprise a programmable nuclease capable of being activated when complexed with a guide nucleic acid and target nucleic acid. The programmable nuclease can become activated after binding of a guide nucleic acid with a target nucleic acid, in which the activated programmable nuclease can cleave the target nucleic acid and can have trans cleavage activity. Trans cleavage activity can be non-specific cleavage of nearby nucleic acids by the activated programmable nuclease, such as trans cleavage of detector nucleic acids with a detection moiety. Once the detector nucleic acid is cleaved by the activated programmable nuclease, the detection moiety can be released from the detector nucleic acid and can generate a signal. The signal can be immobilized on a support medium for detection. The signal can be visualized to assess whether a target nucleic acid comprises a modification.

[0385] Often, the signal is a colorimetric signal or a signal visible by eye. In some instances, the signal is fluorescent, electrical, chemical, electrochemical, or magnetic. A signal can be a calorimetric, potentiometric, amperometric, optical (e.g., fluorescent, colorometric, etc.), or piezo-electric signal. In some cases, the detectable signal is a colorimetric signal or a signal visible by eye. In some instances, the detectable signal is fluorescent, electrical, chemical, electrochemical, or magnetic. In some cases, the first detection signal is generated by binding of the detection moiety to the capture molecule in the detection region, where the first detection signal indicates that the sample contained the target nucleic acid. Sometimes the system is capable of detecting more than one type of target nucleic acid, wherein the system comprises more than one type of guide nucleic acid and more than one type of detector nucleic acid. In some cases, the detectable signal is generated directly by the cleavage event. Alternatively or in combination, the detectable signal is generated indirectly by the signal event. Sometimes the detectable signal is not a fluorescent signal. In some instances, the detectable signal is a colorimetric or color-based signal. In some cases, the detected target nucleic acid is identified based on its spatial location on the detection region of the support medium. In some cases, the second detectable signal is generated in a spatially distinct location than the first generated signal.

[0386] In some cases, the threshold of detection, for a subject method of detecting a single stranded target nucleic acid in a sample, is less than or equal to 10 nM. The term “threshold of detection” is used herein to describe the minimal amount of target nucleic acid that must be present in a sample in order for detection to occur. For example, when a threshold of detection is 10 nM, then a signal can be detected when a target nucleic acid is present in the sample at a concentration of 10 nM or more. In some cases, the threshold of detection is less than or equal to 5 nM, 1 nM, 0.5 nM, 0.1 nM, 0.05 nM, 0.01 nM, 0.005 nM, 0.001 nM, 0.0005 nM, 0.0001 nM, 0.00005 nM, 0.00001 nM, 10 pM, 1 pM, 500 fM, 250 fM, 100 fM, 50 fM, 10 fM, 5 fM, 1 fM, 500 attomole (aM), 100 aM, 50 aM, 10 aM, or 1 aM. In some cases, the threshold of detection is in a range of from 1 aM to 1 nM, 1 aM to 500 pM, 1 aM to 200 pM, 1 aM to 100 pM, 1 aM to 10 pM, 1 aM to 1 pM, 1 aM to 500 fM, 1 aM to 100 fM, 1 aM to 1 fM, 1 aM to 500 aM, 1 aM to 100 aM, 1 aM to 50 aM, 1 aM to 10 aM, 10 aM to 1 nM, 10 aM to 500 pM, 10 aM to 200 pM, 10 aM to 100 pM, 10 aM to 10 pM, 10 aM to 1 pM, 10 aM to 500 fM, 10 aM to 100 fM, 10 aM to 1 fM, 10 aM to 500 aM, 10 aM to 100 aM, 10 aM to 50 aM, 100 aM to 1 nM, 100 aM to 500 pM, 100 aM to 200 pM, 100 aM to 100 pM, 100 aM to 10 pM, 100 aM to 1 pM, 100 aM to 500 fM, 100 aM to 100 fM, 100 aM to 1 fM, 100 aM to 500 aM, 500 aM to 1 nM, 500 aM to 500 pM, 500 aM to 200 pM, 500 aM to 100 pM, 500 aM to 10 pM, 500 aM to 1 pM, 500 aM to 500 fM, 500 aM to 100 fM, 500 aM to 1 fM, 1 fM to 1 nM, 1 fM to 500 pM, 1 fM to 200 pM, 1 fM to 100 pM, 1 fM to 10 pM, 1 fM to 1 pM, 10 fM to 1 nM, 10 fM to 500 pM, 10 fM to 200 pM, 10 fM to 100 pM, 10 fM to 10 pM, 10 fM to 1 pM, 500 fM to 1 nM, 500 fM to 500 pM, 500 fM to 200 pM, 500 fM to 100 pM, 500 fM to 10 pM, 500 fM to 1 pM, 800 fM to 1 nM, 800 fM to 500 pM, 800 fM to 200 pM, 800 fM to 100 pM, 800 fM to 10 pM, 800 fM to 1 pM, fom 1 pM to 1 nM, 1 pM to 500 pM, 1 pM to 200 pM, 1 pM to 100 pM, or 1 pM to 10 pM. In some cases, the threshold of detection in a range of from 800 fM to 100 pM, 1 pM to 10 pM, 10 fM to 500 fM, 10 fM to 50 fM, 50 fM to 100 fM, 100 fM to 250 fM, or 250 fM to 500 fM. In some cases, the minimum concentration at which a single stranded target nucleic acid is detected in a sample is in a range of from 1 aM to 1 nM, 10 aM to 1 nM, 100 aM to 1 nM, 500 aM to 1 nM, 1 fM to 1 nM, 1 fM to 500 pM, 1 fM to 200 pM, 1 fM to 100 pM, 1 fM to 10 pM, 1 fM to 1 pM, 10 fM to 1 nM, 10 fM to 500 pM, 10 fM to 200 pM, 10 fM to 100 pM, 10 fM to 10 pM, 10 fM to 1 pM, 500 fM to 1 nM, 500 fM to 500 pM, 500 fM to 200 pM, 500 fM to 100 pM, 500 fM to 10 pM, 500 fM to 1 pM, 800 fM to 1 nM, 800 fM to 500 pM, 800 fM to 200 pM, 800 fM to 100 pM, 800 fM to 10 pM, 800 fM to 1 pM, 1 pM to 1 nM, 1 pM to 500 pM, from 1 pM to 200 pM, 1 pM to 100 pM, or 1 pM to 10 pM. In some cases, the minimum concentration at which a single stranded target nucleic acid can be detected in a sample is in a range of from 1 aM to 100 pM. In some cases, the minimum concentration at which a single stranded target nucleic acid can be detected in a sample is in a range of from 1 fM to 100 pM. In some cases, the minimum concentration at which a single stranded target nucleic acid can be detected in a sample is in a range of from 10 fM to 100 pM. In some cases, the minimum concentration at which a single stranded target nucleic acid can be detected in a sample is in a range of from 800 fM to 100 pM. In some cases, the minimum concentration at which a single stranded target nucleic acid can be detected in a sample is in a range of from 1 pM to 10 pM. In some cases, the devices, systems, fluidic devices, kits, and methods described herein detect a target single-stranded nucleic acid in a sample comprising a plurality of nucleic acids such as a plurality of non-target nucleic acids, where the target single-stranded nucleic acid is present at a concentration as low as 1 aM, 10 aM, 100 aM, 500 aM, 1 fM, 10 fM, 500 fM, 800 fM, 1 pM, 10 pM, 100 pM, or 1 pM.

[0387] In some cases, the devices, systems, fluidic devices, kits, and methods described herein detect a target single-stranded nucleic acid in a sample where the sample is contacted with the reagents for a predetermined length of time sufficient for the trans cleavage to occur or cleavage reaction to reach completion. In some cases, the devices, systems, fluidic devices, kits, and methods described herein detect a target single-stranded nucleic acid in a sample where the sample is contacted with the reagents for no greater than 60 minutes. Sometimes the sample is contacted with the reagents for no greater than 120 minutes, 110 minutes, 100 minutes, 90 minutes, 80 minutes, 70 minutes, 60 minutes, 55 minutes, 50 minutes, 45 minutes, 40 minutes, 35 minutes, 30 minutes, 25 minutes, 20 minutes, 15 minutes, 10 minutes, 5 minutes, 4 minutes, 3 minutes, 2 minutes, or 1 minute. Sometimes the sample is contacted with the reagents for at least 120 minutes, 110 minutes, 100 minutes, 90 minutes, 80 minutes, 70 minutes, 60 minutes, 55 minutes, 50 minutes, 45 minutes, 40 minutes, 35 minutes, 30 minutes, 25 minutes, 20 minutes, 15 minutes, 10 minutes, or 5 minutes. In some cases, the devices, systems, fluidic devices, kits, and methods described herein can detect a target nucleic acid in a sample in less than 10 hours, less than 9 hours, less than 8 hours, less than 7 hours, less than 6 hours, less than 5 hours, less than 4 hours, less than 3 hours, less than 2 hours, less than 1 hour, less than 50 minutes, less than 45 minutes, less than 40 minutes, less than 35 minutes, less than 30 minutes, less than 25 minutes, less than 20 minutes, less than 15 minutes, less than 10 minutes, less than 9 minutes, less than 8 minutes, less than 7 minutes, less than 6 minutes, or less than 5 minutes.

[0388] When a guide nucleic acid binds to a target nucleic acid, the programmable nuclease's trans cleavage activity can be initiated, and detector nucleic acids can be cleaved, resulting in the detection of fluorescence. Some methods as described herein can a method of assaying for a target nucleic acid in a sample comprises contacting the sample to a complex comprising a guide nucleic acid comprising a segment that is reverse complementary to a segment of the target nucleic acid and a programmable nuclease that exhibits sequence independent cleavage upon forming a complex comprising the segment of the guide nucleic acid binding to the segment of the target nucleic acid; and assaying for a signal indicating cleavage of at least some protein-nucleic acids of a population of protein-nucleic acids, wherein the signal indicates a presence of the target nucleic acid in the sample and wherein absence of the signal indicates an absence of the target nucleic acid in the sample. The cleaving of the detector nucleic acid using the programmable nuclease may cleave with an efficiency of 50% as measured by a change in a signal that is calorimetric, potentiometric, amperometric, optical (e.g., fluorescent, colorimetric, etc.), or piezo-electric, as non-limiting examples. Some methods as described herein can be a method of detecting a target nucleic acid in a sample comprising contacting the sample comprising the target nucleic acid with a guide nucleic acid targeting a target nucleic acid segment, a programmable nuclease capable of being activated when complexed with the guide nucleic acid and the target nucleic acid segment, a single stranded detector nucleic acid comprising a detection moiety, wherein the detector nucleic acid is capable of being cleaved by the activated programmable nuclease, thereby generating a first detectable signal, cleaving the single stranded detector nucleic acid using the programmable nuclease that cleaves as measured by a change in color, and measuring the first detectable signal on the support medium. The cleaving of the single stranded detector nucleic acid using the programmable nuclease may cleave with an efficiency of 50% as measured by a change in color. In some cases, the cleavage efficiency is at least 40%, 50%, 60%, 70%, 80%, 90%, or 95% as measured by a change in color. The change in color may be a detectable colorimetric signal or a signal visible by eye. The change in color may be measured as a first detectable signal. The first detectable signal can be detectable within 5 minutes of contacting the sample comprising the target nucleic acid with a guide nucleic acid targeting a target nucleic acid segment, a programmable nuclease capable of being activated when complexed with the guide nucleic acid and the target nucleic acid segment, and a single stranded detector nucleic acid comprising a detection moiety, wherein the detector nucleic acid is capable of being cleaved by the activated nuclease. The first detectable signal can be detectable within 1, 2, 3, 4, 5, 6, 7, 8, 9, 10, 11, 12, 13, 14, 15, 20, 25, 30, 35, 40, 45, 50, 55, 60, 70, 80, 90, 100, 110, or 120 minutes of contacting the sample.

[0389] In some cases, the devices, systems, fluidic devices, kits, and methods described herein detect a target single-stranded nucleic acid with a programmable nuclease and a single-stranded detector nucleic acid in a sample where the sample is contacted with the reagents for a predetermined length of time sufficient for trans cleavage of the single stranded detector nucleic acid. For example, a programmable nuclease is LbuCas13a that detects a target nucleic acid and a single stranded detector nucleic acid comprises two adjacent uracil nucleotides with a green detectable moiety that is detected upon cleavage. As another example, a programmable nuclease is LbaCas13a that detects a target nucleic acid and a single-stranded detector nucleic acid comprises two adjacent adenine nucleotides with a red detectable moiety that is detected upon cleavage.

[0390] In some cases, the devices, systems, fluidic devices, kits, and methods described herein detect different two target single-stranded nucleic acids with two different programmable nucleases and two different single-stranded detector nucleic acids in a sample where the sample is contacted with the reagents for a predetermined length of time sufficient for trans cleavage of the at least two single-stranded detector nucleic acids. For example, a first programmable nuclease is LbuCas13a, which is activated by a first single-stranded target nucleic acid and upon activation, cleaves a first single-stranded detector nucleic acid comprising two adjacent uracil nucleotides with a green detectable moiety that is detected upon cleavage, and a second programmable nuclease is LbaCas13a, which is activated by a second single-stranded target nucleic acid and upon activation, cleaves a second single-stranded detector nucleic acid comprising two adjacent adenine nucleotides with a red detectable moiety that is detected upon cleavage. In some cases, the activation of both programmable nucleases to cleave their respective single-stranded nucleic acids, for example LbuCas13a that cleaves a first single-stranded detector nucleic acid comprising two adjacent uracil nucleotides with a green detectable moiety that is detected upon cleavage and LbaCas13a that cleaves a second single-stranded detector nucleic acid comprises two adjacent adenine nucleotides with a red detectable moiety that is detected upon cleavage, the subsequence detection of a yellow signal indicates that the first single-stranded target nucleic acid and the second single-stranded target nucleic are present in the sample.

[0391] Alternatively, the devices, systems, fluidic devices, kits, and methods described herein can comprise a first programmable nuclease that detects the presence of a first single-stranded target nucleic acid in a sample and a second programmable nuclease that is used as a control. For example, a first programmable nuclease is Lbu13a, which cleaves a first single-stranded detector nucleic acid comprising two adjacent uracil nucleotides with a green detectable moiety that is detected upon cleavage and which is activated by a first single-stranded target nucleic acid if it is present in the sample, and a second programmable nuclease is Lba13a, which cleaves a second single-stranded detector nucleic acid comprising two adjacent adenine nucleotides with a red detectable moiety that is detected upon cleavage and which is activated by a second single-stranded target nucleic acid that is not found (and would not be expected to ever be found) in the sample and serves as a control. In this case, the detection of a red signal or a yellow signal indicates there is a problem with the test (e.g., the sample contains a high level of other RNAses that are cleaving the single-stranded detector nucleic acids in the absence of activation of the second programmable nuclease), but the detection of a green signal indicates the test is working correctly and the first target single-stranded nucleic acid of the first programmable nuclease is present in the sample.

[0392] As additional examples, the devices, systems, fluidic devices, kits, and methods described herein detect different two target single-stranded nucleic acids with two different programmable nucleases and two different single stranded detector nucleic acids in a sample where the sample is contacted with the reagents for a predetermined length of time sufficient for trans cleavage of the at least two single stranded detector nucleic acid. For example, a first programmable nuclease is a Cas13a protein, which cleaves a first single-stranded detector nucleic that is detected upon cleavage and which is activated by a first single-stranded target nucleic acid from a sepsis RNA biomarker if it is present in the sample, and a second programmable nuclease is a Cas14 protein, which cleaves a second single-stranded detector nucleic acid that is detected upon cleavage and which is activated by a second single-stranded target nucleic acid from in influenza virus.

[0393] The reagents described herein can also include buffers, which are compatible with the devices, systems, fluidic devices, kits, and methods disclosed herein. These buffers are compatible with the other reagents, samples, and support mediums as described herein for detection of an ailment, such as a disease, including those caused by viruses such as influenza. The methods described herein can also include the use of buffers, which are compatible with the methods disclosed herein. For example, a buffer comprises 20 mM HEPES pH 6.8, 50 mM KCl, 5 mM MgCl₂, and 5% glycerol. In some instances the buffer comprises from 0 to 100, 0 to 75, 0 to 50, 0 to 25, 0 to 20, 0 to 10, 0 to 5, 5 to 10,5 to 15, 5 to 20, 5 to 25, to 30, 5 to 40, 5 to 50, 5 to 75, 5 to 100, 10 to 20, 10 to 30, 10 to 40, 10 to 50, 15 to 20, 15 to 25, 15 to 30, 15 to 4, 15 to 50, 20 to 25, 20 to 30, 20 to 40, or 20 to 50 mM HEPES pH 6.8. The buffer can comprise to 0 to 500, 0 to 400, 0 to 300, 0 to 250, 0 to 200, 0 to 150, 0 to 100, 0 to 75, 0 to 50, 0 to 25, 0 to 20, 0 to 10, 0 to 5, 5 to 10, 5 to 15, 5 to 20, 5 to 25, to 30, 5 to 40, 5 to 50, 5 to 75, 5 to 100, 5 to 150, 5 to 200, 5 to 250, 5 to 300, 5 to 400, 5 to 500, 25 to 50, 25 to 75, 25 to 100, 50 to 100, 50 150, 50 to 200, 50 to 250, 50 to 300, 100 to 200, 100 to 250, 100 to 300, or 150 to 250 mM KCl. In other instances the buffer comprises 0 to 100, 0 to 75, 0 to 50, 0 to 25, 0 to 20, 0 to 10, 0 to 5, 5 to 10, 5 to 15, 5 to 20, 5 to 25, to 30, 5 to 40, 5 to 50, 5 to 75, 5 to 100, 10 to 20, 10 to 30, 10 to 40, 10 to 50, 15 to 20, 15 to 25, 15 to 30, 15 to 4, 15 to 50, 20 to 25, 20 to 30, 20 to 40, or 20 to 50 mM MgCl₂. The buffer can comprise 0 to 25, 0 to 20, 0 to 10, 0 to 5, 5 to 10, 5 to 15, 5 to 20, 5 to 25, 5 to 30% glycerol.

[0394] As another example, a buffer comprises 100 mM Imidazole pH 7.5; 250 mM KCl, 25 mM MgCl₂, 50 ug/mL BSA, 0.05% Igepal Ca-630, and 25% Glycerol. In some instances the buffer comprises 0 to 500, 0 to 400, 0 to 300, 0 to 250, 0 to 200, 0 to 150, 0 to 100, 0 to 75, 0 to 50, 0 to 25, 0 to 20, 0 to 10, 0 to 5, 5 to 10, 5 to 15, 5 to 20, 5 to 25, to 30, 5 to 40, 5 to 50, 5 to 75, 5 to 100, 5 to 150, 5 to 200, 5 to 250, 5 to 300, 5 to 400, 5 to 500, 25 to 50, 25 to 75, 25 to 100, 50 to 100, 50 150, 50 to 200, 50 to 250, 50 to 300, 100 to 200, 100 to 250, 100 to 300, or 150 to 250 mM Imidazole pH 7.5. The buffer can comprise to 0 to 500, 0 to 400, 0 to 300, 0 to 250, 0 to 200, 0 to 150, 0 to 100, 0 to 75, 0 to 50, 0 to 25, 0 to 20, 0 to 10, 0 to 5, 5 to 10, 5 to 15, 5 to 20, 5 to 25, to 30, 5 to 40, 5 to 50, 5 to 75, 5 to 100, 5 to 150, 5 to 200, 5 to 250, 5 to 300, 5 to 400, 5 to 500, 25 to 50, 25 to 75, 25 to 100, 50 to 100, 50 150, 50 to 200, 50 to 250, 50 to 300, 100 to 200, 100 to 250, 100 to 300, or 150 to 250 mM KCl. In other instances the buffer comprises 0 to 100, 0 to 75, 0 to 50, 0 to 25, 0 to 20, 0 to 10, 0 to 5, 5 to 10, 5 to 15, 5 to 20, 5 to 25, to 30, 5 to 40, 5 to 50, 5 to 75, 5 to 100, 10 to 20, 10 to 30, 10 to 40, 10 to 50, 15 to 20, 15 to 25, 15 to 30, 15 to 4, 15 to 50, 20 to 25, 20 to 30, 20 to 40, or 20 to 50 mM MgCl₂. The buffer, in some instances, comprises 0 to 100, 0 to 75, 0 to 50, 0 to 25, 0 to 20, 0 to 10, 0 to 5, 5 to 50, 5 to 75, 5 to 100, 10 to 20, 10 to 50, 10 to 75, 10 to 100, 25 to 50, 25 to 75 25 to 100, 50 to 75, or 50 to 100 ug/mL BSA. In some instances, the buffer comprises 0 to 1, 0 to 0.5, 0 to 0.25, 0 to 0.01, 0 to 0.05, 0 to 0.025, 0 to 0.01, 0.01 to 0.025, 0.01 to 0.05, 0.01 to 0.1, 0.01 to 0.25, 0.01, to 0.5, 0.01 to 1, 0.025 to 0.05, 0.025 to 0.1, 0.025, to 0.5, 0.025 to 1, 0.05 to 0.1, 0.05 to 0.25, 0.05 to 0.5, 0.05 to 0.75, 0.05 to 1, 0.1 to 0.25, 0.1 to 0.5, or 0.1 to 1% Igepal Ca-630. The buffer can comprise 0 to 25, 0 to 20, 0 to 10, 0 to 5, 5 to 10, 5 to 15, 5 to 20, 5 to 25, 5 to 30% glycerol.

[0395] A buffer of the present disclosure may comprise a viral lysis buffer. A viral lysis buffer may lyse a coronavirus capsid in a viral sample (e.g., a sample collected from an individual suspected of having a coronavirus infection), releasing a viral genome. The viral lysis buffer may be compatible with amplification (e.g., RT-LAMP amplification) of a target region of the viral genome. The viral lysis buffer may be compatible with detection (e.g., a DETECTR reaction disclosed herein). A viral lysis buffer that is functional to lyse a virus and is compatible with amplification, detection, or both may be a dual lysis buffer. A viral lysis buffer that is functional to lyse a virus and is compatible with amplification may be a dual lysis/amplification buffer. A viral lysis buffer that is functional to lyse a virus and is compatible with detection may be a dual lysis/detection buffer. A sample may be prepared in a one-step sample preparation method comprising suspending the sample in a viral lysis buffer compatible with amplification, detection (e.g., a DETECTR reaction), or both. A viral lysis buffer compatible with amplification (e.g., RT-LAMP amplification), detection (e.g., DETECTR), or both, may comprise a buffer (e.g., Tris-HCl, phosphate, or HEPES), a reducing agent (e.g., N-Acetyl Cysteine (NAC), Dithiothreitol (DTT), β-mercaptoethanol (BME), or tris(2-carboxyethyl)phosphine (TCEP)), a chelating agent (e.g., EDTA or EGTA), a detergent (e.g., deoxycholate, NP-40 (Ipgal), Triton X-100, or Tween 20), a salt (e.g., ammonium acetate, magnesium acetate, manganese acetate, potassium acetate, sodium acetate, ammonium chloride, potassium chloride, magnesium chloride, manganese chloride, sodium chloride, ammonium sulfate, magnesium sulfate, manganese sulfate, potassium sulfate, or sodium sulfate), or a combination thereof. For example, a viral lysis buffer may comprise a buffer and a reducing agent, or a viral lysis buffer may comprise a buffer and a chelating agent. The viral lysis buffer may be formulated at a low pH. For example, the viral lysis buffer may be formulated at a pH of from about pH 4 to about pH 5. In some embodiments, the viral lysis buffer may be formulated at a pH of from about pH 4 to about pH 8.8. In some embodiments, the viral lysis buffer may be formulated at a pH of from about pH 4 to about pH 9. The viral lysis buffer may further comprise a preservative (e.g., ProClin 150). In some embodiments, the viral lysis buffer may comprise an activator of the amplification reaction. For example, the buffer may comprise primers, dNTPs, or magnesium (e.g., MgSO₄, MgCl₂ or MgOAc), or a combination thereof, to activate the amplification reaction. In some embodiments, an activator (e.g., primers, dNTPs, or magnesium) may be added to the buffer following lysis of the coronavirus to initiate the amplification reaction.

[0396] A viral lysis buffer may comprise a pH of about 3.5, about 3.6, about 3.7, about 3.8, about 3.9, about 4, about 4.1, about 4.2, about 4.3, about 4.4, about 4.5, about 4.6, about 4.7, about 4.8, about 4.9, about 5, about 5.1, about 5.2, about 5.3, about 5.4, about 5.5, about 6, about 6.5, about 7, about 7.5, about 8, about 8.5, or about 9. In some embodiments, a viral lysis buffer may comprise a pH of from 3.5 to 4.5, from 4 to 5, from 4.5 to 5.5, from 3.5 to 4, from 4 to 4.5, from 4.5 to 5, from 5 to 5.5, from 5 to 6, from 6 to 7, from 7 to 8, or from 8 to 9.

[0397] A viral lysis buffer may comprise a magnesium concentration of about 0 mM, about 2 mM, about 4 mM, about 5 mM, about 6 mM, about 8 mM, about 10 mM, about 12 mM, about 13 mM, about 14 mM, about 15 mM, about 20 mM, about 25 mM, about 30 mM, about 35 mM, about 40 mM, about 45 mM, about 50 mM, about 55 mM, or about 60 mM of magnesium (e.g., MgSO₄, MgCl₂ or MgOAc). A viral lysis buffer may comprise a magnesium concentration of from 0 mM to 5 mM, from 5 mM to 10 mM, from 10 mM to 15 mM, from 15 mM to 20 mM, from 20 mM to 25 mM, from 25 mM to 30 mM, from 30 mM to 40 mM, from 40 mM to 50 mM, or from 50 mM to 60 mM of magnesium (e.g., MgSO₄, MgCl₂ or MgOAc). In some embodiments, the magnesium may be added after viral lysis to activate an amplification reaction.

[0398] A viral lysis buffer may comprise a reducing agent (e.g., NAC, DTT, BME, or TCEP) at a concentration of about 1 mM, about 2 mM, about 3 mM, about 4 mM, about 5 mM, about 6 mM, about 7 mM, about 8 mM, about 10 mM, about 12 mM, about 15 mM, about 20 mM, about 25 mM, about 30 mM, about 40 mM, about 50 mM, about 60 mM, about 7 mM, about 80 mM, about 90 mM, about 100 mM, or about 120 mM. A viral lysis buffer may comprise a reducing agent (e.g., NAC, DTT, BME, or TCEP) at a concentration of from 1 mM to 5 mM, from 5 mM to 10 mM, from 10 mM to 15 mM, from 15 mM to 20 mM, from 20 mM to 25 mM, or from 25 mM to 30 mM, from 30 mM to 40 mM, from 40 mM to 50 mM, from 50 mM to 60 mM, from 60 mM to 70 mM, from 70 mM to 80 mM, or from 80 mM to 90 mM, from 90 mM to 100 mM, or from 100 mM to 120 mM. A viral lysis buffer may comprise a chelator (e.g., EDTA or EGTA) at a concentration of about 0.1 mM, about 0.2 mM, about 0.3 mM, about 0.4 mM, about 0.5 mM, about 0.6 mM, about 0.7 mM, about 0.8 mM, about 0.9 mM, about 1 mM, about 2 mM, about 3 mM, about 4 mM, about 5 mM, about 6 mM, about 7 mM, about 8 mM, about 10 mM, about 12 mM, about 15 mM, about 20 mM, about 25 mM, or about 30 mM. A viral lysis buffer may comprise a chelator (e.g., EDTA or EGTA) at a concentration of from 0.1 mM to 0.5 mM, from 0.25 mM to 0.5 mM, from 0.4 mM to 0.6 mM, from 0.5 mM to 1 mM, from 1 mM to 5 mM, from 5 mM to 10 mM, from 10 mM to 15 mM, from 15 mM to 20 mM, from 20 mM to 25 mM, or from 25 mM to 30 mM.

[0399] A viral lysis buffer may comprise a salt (e.g., ammonium acetate ((NH₄)₂OAc), magnesium acetate (MgOAc), manganese acetate (MnOAc), potassium acetate (K₂OAc), sodium acetate (Na₂OAc), ammonium chloride (NH₄Cl), potassium chloride (KCl), magnesium chloride (MgCl₂), manganese chloride (MnCl₂), sodium chloride (NaCl), ammonium sulfate ((NH₄)₂SO₄), magnesium sulfate (MgSO₄), manganese sulfate (MnSO₄), potassium sulfate (K₂SO₄), or sodium sulfate (Na₂SO₄)) at a concentration of about 1 mM, about 5 mM, about 10 mM, about 15 mM, about 20 mM, about 25 mM, about 30 mM, about 35 mM, about 40 mM, about 45 mM, about 50 mM, about 55 mM, about 60 mM, about 70 mM, about 80 mM, about 90 mM, or about 100 mM. A viral lysis buffer may comprise a salt (e.g., (NH₄)₂OAc, MgOAc, MnOAc, K₂OAc, Na₂OAc, NH₄Cl, KCl, MgCl₂, MnCl₂, NaCl, (NH₄)₂SO₄, MgSO₄, MnSO₄, K₂SO₄, or Na₂SO₄) at a concentration of from 1 mM to 5 mM, from 1 mM to 10 mM, from 5 mM to 10 mM, from 10 mM to 15 mM, from 15 mM to 20 mM, from 20 mM to 25 mM, from 25 mM to 30 mM, from 30 mM to 35 mM, from 35 mM to 40 mM, from 40 mM to 45 mM, from 45 mM to 50 mM, from 50 mM to 55 mM, from 55 mM to 60 mM, from 60 mM to 70 mM, from 70 mM to 80 mM, from 80 mM to 90 mM, or from 90 mM to 100 mM.

[0400] A viral lysis buffer may comprise a detergent (e.g., deoxycholate, NP-40 (Ipgal), Triton X-100, or Tween 20) at a concentration of about 0.01%, about 0.05%, about 0.10%, about 0.15%, about 0.20%, about 0.25%, about 0.30%, about 0.35%, about 0.40%, about 0.45%, about 0.50%, about 0.55%, about 0.60%, about 0.65%, about 0.70%, about 0.75%, about 0.80%, about 0.85%, about 0.90%, about 0.95%, about 1.00%, about 1.10%, about 1.20%, about 1.30%, about 1.40%, about 1.50%, about 2.00%, about 2.50%, about 3.00%, about 3.50%, about 4.00%, about 4.50%, or about 5.00%. A viral lysis buffer may comprise a detergent (e.g., deoxycholate, NP-40 (Ipgal), Triton X-100, or Tween 20) at a concentration of from 0.01% to 0.10%, from 0.05% to 0.15%, from 0.10% to 0.20%, from 0.15% to 0.25%, from 0.20% to 0.30%, from 0.25% to 0.35%, from 0.30% to 0.40%, from 0.35% to 0.45%, from 0.40% to 0.50%, from 0.45% to 0.55%, from 0.50% to 0.60%, from 0.55% to 0.65%, from 0.60% to 0.70%, from 0.65% to 0.75%, from 0.70% to 0.80%, from 0.75% to 0.85%, from 0.80% to 0.90%, from 0.85% to 0.95%, from 0.90% to 1.00%, from 0.95% to 1.10%, from 1.00% to 1.20%, from 1.10% to 1.30%, from 1.20% to 1.40%, from 1.30% to 1.50%, from 1.40% to 1.60%, from 1.50% to 2.00%, from 2.00% to 2.50%, from 2.50% to 3.00%, from 3.00% to 3.50%, from 3.50% to 4.00%, from 4.00% to 4.50%, or from 4.50% to 5.00%.

[0401] A lysis reaction may be performed at a range of temperatures. In some embodiments, a lysis reaction may be performed at about room temperature. In some embodiments, a lysis reaction may be performed at about 95° C. In some embodiments, a lysis reaction may be performed at from 1° C. to 10° C., from 4° C. to 8° C., from 10° C. to 20° C., from 15° C. to 25° C., from 15° C. to 20° C., from 18° C. to 25° C., from 18° C. to 95° C., from 20° C. to 37° C., from 25° C. to 40° C., from 35° C. to 45° C., from 40° C. to 60° C., from 50° C. to 70° C., from 60° C. to 80° C., from 70° C. to 90° C., from 80° C. to 95° C., or from 90° C. to 99° C. In some embodiments, a lysis reaction may be performed for about 5 minutes, about 15 minutes, or about 30 minutes. In some embodiments, a lysis reaction may be performed for from 2 minutes to 5 minutes, from 3 minutes to 8 minutes, from 5 minutes to 15 minutes, from 10 minutes to 20 minutes, from 15 minutes to 25 minutes, from 20 minutes to 30 minutes, from 25 minutes to 35 minutes, from 30 minutes to 40 minutes, from 35 minutes to 45 minutes, from 40 minutes to 50 minutes, from 45 minutes to 55 minutes, from 50 minutes to 60 minutes, from 55 minutes to 65 minutes, from 60 minutes to 70 minutes, from 65 minutes to 75 minutes, from 70 minutes to 80 minutes, from 75 minutes to 85 minutes, or from 80 minutes to 90 minutes.

[0402] A number of detection devices and methods are consistent with methods disclosed herein. For example, any device that can measure or detect a calorimetric, potentiometric, amperometric, optical (e.g., fluorescent, colorometric, etc.), or piezo-electric signal. Often a calorimetric signal is heat produced after cleavage of the detector nucleic acids. Sometimes, a calorimetric signal is heat absorbed after cleavage of the detector nucleic acids. A potentiometric signal, for example, is electrical potential produced after cleavage of the detector nucleic acids. An amperometric signal can be movement of electrons produced after the cleavage of detector nucleic acid. Often, the signal is an optical signal, such as a colorometric signal or a fluorescence signal. An optical signal is, for example, a light output produced after the cleavage of the detector nucleic acids. Sometimes, an optical signal is a change in light absorbance between before and after the cleavage of detector nucleic acids. Often, a piezo-electric signal is a change in mass between before and after the cleavage of the detector nucleic acid. Sometimes, the detector nucleic acid is protein-nucleic acid. Often, the protein-nucleic acid is an enzyme-nucleic acid.

[0403] The results from the detection region from a completed assay can be detected and analyzed in various ways, for example, by a glucometer. In some cases, the positive control spot and the detection spot in the detection region is visible by eye, and the results can be read by the user. In some cases, the positive control spot and the detection spot in the detection region is visualized by an imaging device or other device depending on the type of signal. Often, the imaging device is a digital camera, such a digital camera on a mobile device. The mobile device may have a software program or a mobile application that can capture an image of the support medium, identify the assay being performed, detect the detection region and the detection spot, provide image properties of the detection spot, analyze the image properties of the detection spot, and provide a result. Alternatively or in combination, the imaging device can capture fluorescence, ultraviolet (UV), infrared (IR), or visible wavelength signals. The imaging device may have an excitation source to provide the excitation energy and captures the emitted signals. In some cases, the excitation source can be a camera flash and optionally a filter. In some cases, the imaging device is used together with an imaging box that is placed over the support medium to create a dark room to improve imaging. The imaging box can be a cardboard box that the imaging device can fit into before imaging. In some instances, the imaging box has optical lenses, mirrors, filters, or other optical elements to aid in generating a more focused excitation signal or to capture a more focused emission signal. Often, the imaging box and the imaging device are small, handheld, and portable to facilitate the transport and use of the assay in remote or low resource settings.

[0404] The assay described herein can be visualized and analyzed by a mobile application (app) or a software program. Using the graphic user interface (GUI) of the app or program, an individual can take an image of the support medium, including the detection region, barcode, reference color scale, and fiduciary markers on the housing, using a camera on a mobile device. The program or app reads the barcode or identifiable label for the test type, locate the fiduciary marker to orient the sample, and read the detectable signals, compare against the reference color grid, and determine the presence or absence of the target nucleic acid, which indicates the presence of the gene, virus, or the agent responsible for the disease. The mobile application can present the results of the test to the individual. The mobile application can store the test results in the mobile application. The mobile application can communicate with a remote device and transfer the data of the test results. The test results can be viewable remotely from the remote device by another individual, including a healthcare professional. A remote user can access the results and use the information to recommend action for treatment, intervention, clean up of an environment.

### Detection of a Mutation in a Target Nucleic Acid

[0405] Disclosed herein are methods of assaying for a target nucleic acid as described herein that can be used for detection of a mutation in a target nucleic acid. For example, a method of assaying for a target nucleic acid in a sample comprises contacting the sample to a complex comprising a guide nucleic acid comprising a segment that is reverse complementary to a segment of the target nucleic acid and a programmable nuclease that exhibits sequence independent cleavage upon forming a complex comprising the segment of the guide nucleic acid binding to the segment of the target nucleic acid; and assaying for a signal indicating cleavage of at least some protein-nucleic acids of a population of protein-nucleic acids, wherein the signal indicates a presence of the target nucleic acid in the sample and wherein absence of the signal indicates an absence of the target nucleic acid in the sample. The detection of the signal can indicate the presence of the target nucleic acid. Sometimes, the target nucleic acid comprises a mutation. Often, the mutation is a single nucleotide mutation. As another example, a method of assaying for a target nucleic acid in a sample, for example, comprises: a) contacting the sample to a complex comprising a guide nucleic acid comprising a segment that is reverse complementary to a segment of the target nucleic acid and a programmable nuclease that exhibits sequence independent cleavage upon forming a complex comprising the segment of the guide nucleic acid binding to the segment of the target nucleic acid; b) contacting the complex to a substrate; c) contacting the substrate to a reagent that differentially reacts with a cleaved substrate; and d) assaying for a signal indicating cleavage of the substrate, wherein the signal indicates a presence of the target nucleic acid in the sample and wherein absence of the signal indicates an absence of the target nucleic acid in the sample. Often, the substrate is an enzyme-nucleic acid. Sometimes, the substrate is an enzyme substrate-nucleic acid.

[0406] Methods described herein can be used to identify a mutation in a target nucleic acid. The methods can be used to identify a single nucleotide mutation of a target nucleic acid that affects the expression of a gene. A mutation that affects the expression of gene can be a single nucleotide mutation of a target nucleic acid within the gene, a single nucleotide mutation of a target nucleic acid comprising RNA associated with the expression of a gene, or a target nucleic acid comprising a single nucleotide mutation of a nucleic acid associated with regulation of expression of a gene, such as an RNA or a promoter, enhancer, or repressor of the gene. Often, a status of a mutation is used to diagnose or identify diseases associated with the mutation of target nucleic acid. Detection of target nucleic acids having a mutation are applicable to a number of fields, such as clinically, as a diagnostic, in laboratories as a research tool, and in agricultural applications. Often, the mutation is a single nucleotide mutation. The mutation may result in a mutated strain of a virus, such as an influenza A or influenza B virus.

### Disease Detection

[0407] Disclosed herein are methods of assaying for a target nucleic acid as described herein that can be used for disease detection. For example, a method of assaying for a target nucleic acid (e.g., from an influenza virus) in a sample comprises contacting the sample to a complex comprising a guide nucleic acid comprising a segment that is reverse complementary to a segment of the target nucleic acid and a programmable nuclease that exhibits sequence independent cleavage upon forming a complex comprising the segment of the guide nucleic acid binding to the segment of the target nucleic acid; and assaying for a signal indicating cleavage of at least some protein-nucleic acids of a population of protein-nucleic acids, wherein the signal indicates a presence of the target nucleic acid in the sample and wherein absence of the signal indicates an absence of the target nucleic acid in the sample. The detection of the signal can indicate the presence of the target nucleic acid. Sometimes, the target nucleic acid comprises a mutation. Often, the mutation is a single nucleotide mutation. As another example, a method of assaying for a target nucleic acid in a sample, for example, comprises: a) contacting the sample to a complex comprising a guide nucleic acid comprising a segment that is reverse complementary to a segment of the target nucleic acid and a programmable nuclease that exhibits sequence independent cleavage upon forming a complex comprising the segment of the guide nucleic acid binding to the segment of the target nucleic acid; b) contacting the complex to a substrate; c) contacting the substrate to a reagent that differentially reacts with a cleaved substrate; and d) assaying for a signal indicating cleavage of the substrate, wherein the signal indicates a presence of the target nucleic acid in the sample and wherein absence of the signal indicates an absence of the target nucleic acid in the sample. Often, the substrate is an enzyme-nucleic acid. Sometimes, the substrate is an enzyme substrate-nucleic acid.

[0408] Methods described herein can be used to identify a mutation in a target nucleic acid from a bacteria, virus, or microbe. The methods can be used to identify a mutation of a target nucleic acid that affects the expression of a gene. A mutation that affects the expression of gene can be a mutation of a target nucleic acid within the gene, a mutation of a target nucleic acid comprising RNA associated with the expression of a gene, or a target nucleic acid comprising a mutation of a nucleic acid associated with regulation of expression of a gene, such as an RNA or a promoter, enhancer, or repressor of the gene. Sometimes, a status of a target nucleic acid mutation is used to determine a pathogenicity of a bacteria, virus, or microbe or treatment resistance, such as resistance to antibiotic treatment. Often, a status of a mutation is used to diagnose or identify diseases associated with the mutation of target nucleic acids in the bacteria, virus, or microbe. Often, the mutation is a single nucleotide mutation.

### Detection as a Research Tool, Point-of-Care, or Over-the-Counter

[0409] Disclosed herein are methods of assaying for a target nucleic acid (e.g., from an influenza virus) as described herein that can be used as a research tool, and can be provided as reagent kits. For example, a method of assaying for a target nucleic acid in a sample comprises contacting the sample to a complex comprising a guide nucleic acid comprising a segment that is reverse complementary to a segment of the target nucleic acid and a programmable nuclease that exhibits sequence independent cleavage upon forming a complex comprising the segment of the guide nucleic acid binding to the segment of the target nucleic acid; and assaying for a signal indicating cleavage of at least some protein-nucleic acids of a population of protein-nucleic acids, wherein the signal indicates a presence of the target nucleic acid in the sample and wherein absence of the signal indicates an absence of the target nucleic acid in the sample. The detection of the signal can indicate the presence of the target nucleic acid. Sometimes, the target nucleic acid comprises a mutation. Often, the mutation is a single nucleotide mutation. As another example, a method of assaying for a target nucleic acid in a sample, for example, comprises: a) contacting the sample to a complex comprising a guide nucleic acid comprising a segment that is reverse complementary to a segment of the target nucleic acid and a programmable nuclease that exhibits sequence independent cleavage upon forming a complex comprising the segment of the guide nucleic acid binding to the segment of the target nucleic acid; b) contacting the complex to a substrate; c) contacting the substrate to a reagent that differentially reacts with a cleaved substrate; and d) assaying for a signal indicating cleavage of the substrate, wherein the signal indicates a presence of the target nucleic acid in the sample and wherein absence of the signal indicates an absence of the target nucleic acid in the sample. Often, the substrate is an enzyme-nucleic acid. Sometimes, the substrate is an enzyme substrate-nucleic acid.

[0410] The methods as described herein can be used to identify a single nucleotide mutation in a target nucleic acid. The methods can be used to identify mutation of a target nucleic acid that affects the expression of a gene. A mutation that affects the expression of gene can be a single nucleotide mutation of a target nucleic acid within the gene, a mutation of a target nucleic acid comprising RNA associated with the expression of a gene, or a target nucleic acid comprising a mutation of a nucleic acid associated with regulation of expression of a gene, such as an RNA or a promoter, enhancer, or repressor of the gene. Often, the mutation is a single nucleotide mutation.

[0411] The reagent kits or research tools can be used to detect any number of target nucleic acids, mutations, or other indications disclosed herein in a laboratory setting. Reagent kits can be provided as reagent packs for open box instrumentation.

[0412] In other embodiments, any of the systems, assay formats, Cas reporters, programmable nucleases, or other reagents can be used in a point-of-care (POC) test, which can be carried out at a decentralized location such as a hospital, POL, or clinic. These point-of-care tests can be used to diagnose any of the indications disclosed herein, such as influenza or streptococcal infections, or can be used to measure the presence or absence of a particular mutation in a target nucleic acid (e.g., EGFR). POC tests can be provided as small instruments with a consumable test card, wherein the test card is any of the assay formats (e.g., a lateral flow assay) disclosed herein.

[0413] In still other embodiments, any of the systems, assay formats, Cas reporters, programmable nucleases, or other reagents can be used in an over-the-counter (OTC), readerless format, which can be used at remote sites or at home to diagnose a range of indications, such as influenza. These indications can include influenza A, influenza B, streptococcal infections, or CT/NG infections. OTC products can include a consumable test card, wherein the test card is any of the assay formats (e.g., a lateral flow assay) disclosed herein. In an OTC product, the test card can be interpreted visually or using a mobile phone.

### Support Medium

[0414] A number of support mediums are consistent with the devices, systems, fluidic devices, kits, and methods disclosed herein. These support mediums are, for example, consistent with fluidic devices disclosed herein for detection of a target nucleic acid (e.g., from an influenza virus) within the sample, wherein the fluidic device may comprise multiple pumps, valves, reservoirs, and chambers for sample preparation, amplification of a target nucleic acid within the sample, mixing with a programmable nuclease, and detection of a detectable signal arising from cleavage of detector nucleic acids by the programmable nuclease within the fluidic system itself. These support mediums are compatible with the samples, reagents, and fluidic devices described herein for detection of an ailment, such as a a viral infection, for example an infection from influenza A or influenza B. A support medium described herein can provide a way to present the results from the activity between the reagents and the sample. The support medium provides a medium to present the detectable signal in a detectable format. Optionally, the support medium concentrates the detectable signal to a detection spot in a detection region to increase the sensitivity, specificity, or accuracy of the assay. The support mediums can present the results of the assay and indicate the presence or absence of the disease of interest targeted by the target nucleic acid. The result on the support medium can be read by eye or using a machine. The support medium helps to stabilize the detectable signal generated by the cleaved detector molecule on the surface of the support medium. In some instances, the support medium is a lateral flow assay strip. In some instances, the support medium is a PCR plate. The PCR plate can have 96 wells or 384 wells. The PCR plate can have a subset number of wells of a 96 well plate or a 384 well plate. A subset number of wells of a 96 well PCR plate is, for example, 1, 2, 3, 4, 5, 6, 7, 8, 9, 10, 11, 12, 13, 14, 15, 16, 17, 18, 19, 20, 21, 22, 23, 24, 25, 30, 35, 40, 45, 50, 55, 60, 65, 70, 75, 80, 85, 90, or 95 wells. For example, a PCR subset plate can have 4 wells wherein a well is the size of a well from a 96 well PCR plate (e.g., a 4 well PCR subset plate wherein the wells are the size of a well from a 96 well PCR plate). A subset number of wells of a 384 well PCR plate is, for example, 1, 2, 3, 4, 5, 6, 7, 8, 9, 10, 11, 12, 13, 14, 15, 16, 17, 18, 19, 20, 21, 22, 23, 24, 25, 30, 35, 40, 45, 50, 55, 60, 65, 70, 75, 80, 85, 90, 95, 100, 110, 120, 130, 140, 150, 160, 170, 180, 190, 200, 220, 240, 260, 280, 300, 320, 340, 360, or 380 wells. For example, a PCR subset plate can have 20 wells wherein a well is the size of a well from a 384 well PCR plate (e.g., a 20 well PCR subset plate wherein the wells are the size of a well from a 384 well PCR plate). The PCR plate or PCR subset plate can be paired with a fluorescent light reader, a visible light reader, or other imaging device. Often, the imaging device is a digital camera, such a digital camera on a mobile device. The mobile device may have a software program or a mobile application that can capture an image of the PCR plate or PCR subset plate, identify the assay being performed, detect the individual wells and the sample therein, provide image properties of the individuals wells comprising the assayed sample, analyze the image properties of the contents of the individual wells, and provide a result.

[0415] The support medium has at least one specialized zone or region to present the detectable signal. The regions comprise at least one of a sample pad region, a nucleic acid amplification region, a conjugate pad region, a detection region, and a collection pad region. In some instances, the regions are overlapping completely, overlapping partially, or in series and in contact only at the edges of the regions, where the regions are in fluid communication with its adjacent regions. In some instances, the support medium has a sample pad located upstream of the other regions; a conjugate pad region having a means for specifically labeling the detector moiety; a detection region located downstream from sample pad; and at least one matrix which defines a flow path in fluid connection with the sample pad. In some instances, the support medium has an extended base layer on top of which the various zones or regions are placed. The extended base layer may provide a mechanical support for the zones.

[0416] Described herein are sample pad that provide an area to apply the sample to the support medium. The sample may be applied to the support medium by a dropper or a pipette on top of the sample pad, by pouring or dispensing the sample on top of the sample pad region, or by dipping the sample pad into a reagent chamber holding the sample. The sample can be applied to the sample pad prior to reaction with the reagents when the reagents are placed on the support medium or be reacted with the reagents prior to application on the sample pad. The sample pad region can transfer the reacted reagents and sample into the other zones of the support medium. Transfer of the reacted reagents and sample may be by capillary action, diffusion, convection or active transport aided by a pump. In some cases, the support medium is integrated with or overlayed by microfluidic channels to facilitate the fluid transport.

[0417] The dropper or the pipette may dispense a predetermined volume. In some cases, the predetermined volume may range from about 1 μl to about 1000 μl, about 1 μl to about 500 μl, about 1 μl to about 100 μl, or about 1 μl to about 50 μl. In some cases, the predetermined volume may be at least 1 μl, 2 μl, 3 μl, 4 μl, 5 μl, 6 μl, 7 μl, 8 μl, 9 μl, 10 μl, 25 μl, 50 μl, 75 μl, 100 μl, 250 μl, 500 μl, 750 μl, or 1000 μl. The predetermined volume may be no more than 5 μl, 10 μl, 25 μl, 50 μl, 75 μl, 100 μl, 250 μl, 500 μl, 750 μl, or 1000 μl. The dropper or the pipette may be disposable or be single-use.

[0418] Optionally, a buffer or a fluid may also be applied to the sample pad to help drive the movement of the sample along the support medium. In some cases, the volume of the buffer or the fluid may range from about 1 μl to about 1000 μl, about 1 μl to about 500 μl, about 1 μl to about 100 μl, or about 1 μl to about 50 μl. In some cases, the volume of the buffer or the fluid may be at least 1 μl, 2 μl, 3 μl, 4 μl, 5 μl, 6 μl, 7 μl, 8 μl, 9 μl, 10 μl, 25 μl, 50 μl, 75 μl, 100 μl, 250 μl, 500 μl, 750 μl, or 1000 μl. The volume of the buffer or the fluid may be no more than than 5 μl, 10 μl, 25 μl, 50 μl, 75 μl, 100 μl, 250 μl, 500 μl, 750 μl, or 1000 μl. In some cases, the buffer or fluid may have a ratio of the sample to the buffer or fluid of at least 1:1, 1:2, 1:3, 1:4, 1:5, 1:6, 1:7, 1:8, 1:9, or 1:10.

[0419] The sample pad can be made from various materials that transfer most of the applied reacted reagents and samples to the subsequent regions. The sample pad may comprise cellulose fiber filters, woven meshes, porous plastic membranes, glass fiber filters, aluminum oxide coated membranes, nitrocellulose, paper, polyester filter, or polymer-based matrices. The material for the sample pad region may be hydrophilic and have low non-specific binding. The material for the sample pad may range from about 50 μm to about 1000 μm, about 50 μm to about 750 μm, about 50 μm to about 500 μm, or about 100 μm to about 500 μm.

[0420] The sample pad can be treated with chemicals to improve the presentation of the reaction results on the support medium. The sample pad can be treated to enhance extraction of nucleic acid in the sample, to control the transport of the reacted reagents and sample or the conjugate to other regions of the support medium, or to enhance the binding of the cleaved detection moiety to the conjugate binding molecule on the surface of the conjugate or to the capture molecule in the detection region. The chemicals may comprise detergents, surfactants, buffers, salts, viscosity enhancers, or polypeptides. In some instances, the chemical comprises bovine serum albumin.

[0421] Described herein are conjugate pads that provide a region on the support medium comprising conjugates coated on its surface by conjugate binding molecules that can bind to the detector moiety from the cleaved detector molecule or to the control molecule. The conjugate pad can be made from various materials that facilitate binding of the conjugate binding molecule to the detection moiety from cleaved detector molecule and transfer of most of the conjugate-bound detection moiety to the subsequent regions. The conjugate pad may comprise the same material as the sample pad or other zones or a different material than the sample pad. The conjugate pad may comprise glass fiber filters, porous plastic membranes, aluminum oxide coated membranes, paper, cellulose fiber filters, woven meshes, polyester filter, or polymer-based matrices. The material for the conjugate pad region may be hydrophilic, have low non-specific binding, or have consistent fluid flow properties across the conjugate pad. In some cases, the material for the conjugate pad may range from about 50 μm to about 1000 μm, about 50 μm to about 750 μm, about 50 μm to about 500 μm, or about 100 μm to about 500 μm.

[0422] Further described herein are conjugates that are placed on the conjugate pad and immobilized to the conjugate pad until the sample is applied to the support medium. The conjugates may comprise a nanoparticle, a gold nanoparticle, a latex nanoparticle, a quantum dot, a chemiluminescent nanoparticle, a carbon nanoparticle, a selenium nanoparticle, a fluorescent nanoparticle, a liposome, or a dendrimer. The surface of the conjugate may be coated by a conjugate binding molecule that binds to the detection moiety from the cleaved detector molecule.

[0423] The conjugate binding molecules described herein coat the surface of the conjugates and can bind to detection moiety. The conjugate binding molecule binds selectively to the detection moiety cleaved from the detector nucleic acid. Some suitable conjugate binding molecules comprise an antibody, a polypeptide, or a single stranded nucleic acid. In some cases, the conjugate binding molecule binds a dye and a fluorophore. Some such conjugate binding molecules that bind to a dye or a fluorophore can quench their signal. In some cases, the conjugate binding molecule is a monoclonal antibody. In some cases, an antibody, also referred to as an immunoglobulin, includes any isotype, variable regions, constant regions, Fc region, Fab fragments, F(ab′)2 fragments, and Fab′ fragments. Alternatively, the conjugate binding molecule is a non-antibody compound that specifically binds the detection moiety. Sometimes, the conjugate binding molecule is a polypeptide that can bind to the detection moiety. Sometimes, the conjugate binding molecule is avidin or a polypeptide that binds biotin. Sometimes, the conjugate binding molecule is a detector moiety binding nucleic acid.

[0424] The diameter of the conjugate may be selected to provide a desired surface to volume ratio. In some instances, a high surface area to volume ratio may allow for more conjugate binding molecules that are available to bind to the detection moiety per total volume of the conjugates. In some cases, the diameter of the conjugate may range from about 1 nm to about 1000 nm, about 1 nm to about 500 nm, about 1 nm to about 100 nm, or about 1 nm to about 50 nm. In some cases, the diameter of the conjugate may be at least 1 nm, 2 nm, 3 nm, 4 nm, 5 nm, 6 nm, 7 nm, 8 nm, 9 nm, 10 nm, 15 nm, 20 nm, 25 nm, 30 nm, 30 nm, 35 nm, 40 nm, 45 nm, 50 nm, 55 nm, 60 nm, 65 nm, 70 nm, 75 nm, 80 nm, 85 nm, 90 nm, 95 nm, 100 nm, 200 nm, 300 nm, 400 nm, 500 nm, 600 nm, 700 nm, 800 nm, 900 nm, or 1000 nm. In some cases, the diameter of the conjugate may be no more than 1 nm, 2 nm, 3 nm, 4 nm, 5 nm, 6 nm, 7 nm, 8 nm, 9 nm, 10 nm, 15 nm, 20 nm, 25 nm, 30 nm, 30 nm, 35 nm, 40 nm, 45 nm, 50 nm, 55 nm, 60 nm, 65 nm, 70 nm, 75 nm, 80 nm, 85 nm, 90 nm, 95 nm, 100 nm, 200 nm, 300 nm, 400 nm, 500 nm, 600 nm, 700 nm, 800 nm, 900 nm, or 1000 nm.

[0425] The ratio of conjugate binding molecules to the conjugates can be tailored to achieve desired binding properties between the conjugate binding molecules and the detection moiety. In some instances, the molar ratio of conjugate binding molecules to the conjugates is at least 1:1, 1:5, 1:10, 1:20, 1:30, 1:40, 1:50, 1:60, 1:70, 1:80, 1:90, 1:100, 1:110, 1:120, 1:130, 1:140, 1:150, 1:160, 1:170, 1:180, 1:190, 1:200, 1:250, 1:300, 1:350, 1:400, 1:450, or 1:500. In some instances, the mass ratio of conjugate binding molecules to the conjugates is at least 1:1, 1:5, 1:10, 1:20, 1:30, 1:40, 1:50, 1:60, 1:70, 1:80, 1:90, 1:100, 1:110, 1:120, 1:130, 1:140, 1:150, 1:160, 1:170, 1:180, 1:190, 1:200, 1:250, 1:300, 1:350, 1:400, 1:450, or 1:500. In some instances, the number of conjugate binding molecules per conjugate is at least 1, 10, 50, 100, 500, 1000, 5000, or 10000.

[0426] The conjugate binding molecules can be bound to the conjugates by various approached. Sometimes, the conjugate binding molecule can be bound to the conjugate by passive binding. Some such passive binding comprise adsorption, absorption, hydrophobic interaction, electrostatic interaction, ionic binding, or surface interactions. In some cases, the conjugate binding molecule can be bound to the conjugate covalently. Sometimes, the covalent bonding of the conjugate binding molecule to the conjugate is facilitated by EDC/NHS chemistry or thiol chemistry.

[0427] Described herein are detection region on the support medium that provide a region for presenting the assay results. The detection region can be made from various materials that facilitate binding of the conjugate-bound detection moiety from cleaved detector molecule to the capture molecule specific for the detection moiety. The detection pad may comprise the same material as other zones or a different material than the other zones. The detection region may comprise nitrocellulose, paper, cellulose, cellulose fiber filters, glass fiber filters, porous plastic membranes, aluminum oxide coated membranes, woven meshes, polyester filter, or polymer-based matrices. Often the detection region may comprise nitrocellulose. The material for the region pad region may be hydrophilic, have low non-specific binding, or have consistent fluid flow properties across the region pad. The material for the conjugate pad may range from about 10 μm to about 1000 μm, about 10 μm to about 750 μm, about 10 μm to about 500 μm, or about 10 μm to about 300 μm.

[0428] The detection region comprises at least one capture area with a high density of a capture molecule that can bind to the detection moiety from cleaved detection molecule and at least one area with a high density of a positive control capture molecule. The capture area with a high density of capture molecule or a positive control capture molecule may be a line, a circle, an oval, a rectangle, a triangle, a plus sign, or any other shapes. In some instances, the detection region comprise more than one capture area with high densities of more than one capture molecules, where each capture area comprises one type of capture molecule that specifically binds to one type of detection moiety from cleaved detection molecule and are different from the capture molecules in the other capture areas. The capture areas with different capture molecules may be overlapping completely, overlapping partially, or spatially separate from each other. In some instances, the capture areas may overlap and produce a combined detectable signal distinct from the detectable signals generated by the individual capture areas. Usually, the positive control spot is spatially distinct from any of the detection spot.

[0429] The capture molecule described herein bind to detection moiety and immobilized in the detection spot in the detect region. Some suitable capture molecules comprise an antibody, a polypeptide, or a single stranded nucleic acid. In some cases, the capture molecule binds a dye and a fluorophore. Some such capture molecules that bind to a dye or a fluorophore can quench their signal. Sometimes, the capture molecule is an antibody that that binds to a dye or a fluorophore can quench their signal. In some cases, the capture molecule is a monoclonal antibody. In some cases, an antibody, also referred to as an immunoglobulin, includes any isotype, variable regions, constant regions, Fc region, Fab fragments, F(ab′)2 fragments, and Fab′ fragments. Alternatively, the capture molecule is a non-antibody compound that specifically binds the detection moiety. Sometimes, the capture molecule is a polypeptide that can bind to the detection moiety. In some instances, the detection moiety from cleaved detection molecule has a conjugate bound to the detection moiety, and the conjugate-detection moiety complex may bind to the capture molecule specific to the detection moiety on the detection region. Sometimes, the capture molecule is a polypeptide that can bind to the detection moiety. Sometimes, the capture molecule is avidin or a polypeptide that binds biotin. Sometimes, the capture molecule is a detector moiety binding nucleic acid.

[0430] The detection region described herein comprises at least one area with a high density of a positive control capture molecule. The positive control spot in the detection region provides a validation of the assay and a confirmation of completion of the assay. If the positive control spot is not detectable by the visualization methods described herein, the assay is not valid and should be performed again with a new system or kit. The positive control capture molecule binds at least one of the conjugate, the conjugate binding molecule, or detection moiety and is immobilized in the positive control spot in the detect region. Some suitable positive control capture molecules comprise an antibody, a polypeptide, or a single stranded nucleic acid. In some cases, the positive control capture molecule binds to the conjugate binding molecule. Some such positive control capture molecules that bind to a dye or a fluorophore can quench their signal. Sometimes, the positive control capture molecule is an antibody that that binds to a dye or a fluorophore can quench their signal. In some cases, the positive control capture molecule is a monoclonal antibody. In some cases, an antibody includes any isotype, variable regions, constant regions, Fc region, Fab fragments, F(ab′)2 fragments, and Fab′ fragments. Alternatively, the positive control capture molecule is a non-antibody compound that specifically binds the detection moiety. Sometimes, the positive control capture molecule is a polypeptide that can bind to at least one of the conjugate, the conjugate binding molecule, or detection moiety. In some instances, the conjugate unbound to the detection moiety binds to the positive control capture molecule specific to at least one of the conjugate, the conjugate binding molecule.

[0431] The kit or system described herein may also comprise a positive control sample to determine that the activity of at least one of programmable nuclease, a guide nucleic acid, or a single stranded detector nucleic acid. Often, the positive control sample comprises a target nucleic acid that binds to the guide nucleic acid. The positive control sample is contacted with the reagents in the same manner as the test sample and visualized using the support medium. The visualization of the positive control spot and the detection spot for the positive control sample provides a validation of the reagents and the assay.

[0432] The kit or system for detection of a target nucleic acid described herein further can comprises reagents protease treatment of the sample. The sample can be treated with protease, such as Protease K, before amplification or before assaying for a detectable signal. Often, a protease treatment is for no more than 15 minutes. Sometimes, the protease treatment is for no more than 1, 5, 10, 15, 20, 25, 30, or more minutes, or any value from 1 to 30 minutes.

[0433] The kit or system for detection of a target nucleic acid described herein further comprises reagents for nucleic acid amplification of target nucleic acids in the sample. Isothermal nucleic acid amplification allows the use of the kit or system in remote regions or low resource settings without specialized equipment for amplification. Often, the reagents for nucleic acid amplification comprise a recombinase, a oligonucleotide primer, a single-stranded DNA binding (SSB) protein, and a polymerase. Sometimes, nucleic acid amplification of the sample improves at least one of sensitivity, specificity, or accuracy of the assay in detecting the target nucleic acid. In some cases, the nucleic acid amplification is performed in a nucleic acid amplification region on the support medium. Alternatively or in combination, the nucleic acid amplification is performed in a reagent chamber, and the resulting sample is applied to the support medium. Sometimes, the nucleic acid amplification is isothermal nucleic acid amplification. In some cases, the nucleic acid amplification is transcription mediated amplification (TMA). Nucleic acid amplification is helicase dependent amplification (HDA) or circular helicase dependent amplification (cHDA) in other cases. In additional cases, nucleic acid amplification is strand displacement amplification (SDA). In some cases, nucleic acid amplification is by recombinase polymerase amplification (RPA). In some cases, nucleic acid amplification is by at least one of loop mediated amplification (LAMP) or the exponential amplification reaction (EXPAR). Nucleic acid amplification is, in some cases, by rolling circle amplification (RCA), ligase chain reaction (LCR), simple method amplifying RNA targets (SMART), single primer isothermal amplification (SPIA), multiple displacement amplification (MDA), nucleic acid sequence based amplification (NASBA), hinge-initiated primer-dependent amplification of nucleic acids (HIP), nicking enzyme amplification reaction (NEAR), or improved multiple displacement amplification (IMDA). Often, the nucleic acid amplification is performed for no greater than 1, 2, 3, 4, 5, 6, 7, 8, 9, 10, 11, 12, 13, 14, 15, 16, 17, 18, 19, 20, 25, 30, 40, 50, or 60 minutes, or any value from 1 to 60 minutes. Sometimes, the nucleic acid amplification reaction is performed at a temperature of around 20-45° C. In some cases, the nucleic acid amplification reaction is performed at a temperature no greater than 20° C., 25° C., 30° C., 35° C., 37° C., 40° C., 45° C., or any value from 20° C. to 45° C. In some cases, the nucleic acid amplification reaction is performed at a temperature of at least 20° C., 25° C., 30° C., 35° C., 37° C., 40° C., or 45° C., or any value from 20° C. to 45° C.

[0434] Sometimes, the total time for the performing the method described herein is no greater than 3 hours, 2 hours, 1 hour, 50 minutes, 40 minutes, 30 minutes, 20 minutes, or any value from 3 hours to 20 minutes. Often, a method of nucleic acid detection from a raw sample comprises protease treating the sample for no more than 15 minutes, amplifying (can also be referred to as pre-amplyfing) the sample for no more than 15 minutes, subjecting the sample to a programmable nuclease-mediated detection, and assaying nuclease mediated detection. The total time for performing this method, sometimes, is no greater than 3 hours, 2 hours, 1 hour, 50 minutes, 40 minutes, 30 minutes, 20 minutes, or any value from 3 hours to 20 minutes. Often, the protease treatment is Protease K. Often the amplifying is thermal cycling amplification. Sometimes the amplifying is isothermal amplification.

[0435] Described herein are collection pad region that provide a region to collect the sample that flows down the support medium. Often the collection pads are placed downstream of the detection region and comprise an absorbent material. The collection pad can increase the total volume of sample that enters the support medium by collecting and removing the sample from other regions of the support medium. This increased volume can be used to wash unbound conjugates away from the detection region to lower the background and enhance assay sensitivity. When the design of the support medium does not include a collection pad, the volume of sample analyzed in the support medium may be determined by the bed volume of the support medium. The collection pad may provide a reservoir for sample volume and may help to provide capillary force for the flow of the sample down the support medium.

[0436] The collection pad may be prepared from various materials that are highly absorbent and able to retain fluids. Often the collection pads comprise cellulose filters. In some instances, the collection pads comprise cellulose, cotton, woven meshes, polymer-based matrices. The dimension of the collection pad, usually the length of the collection pad, may be adjusted to change the overall volume absorbed by the support medium.

[0437] The support medium described herein may have a barrier around the edge of the support medium. Often the barrier is a hydrophobic barrier that facilitates the maintenance of the sample within the support medium or flow of the sample within the support medium. Usually, the transport rate of the sample in the hydrophobic barrier is much lower than through the regions of the support medium. In some cases, the hydrophobic barrier is prepared by contacting a hydrophobic material around the edge of the support medium. Sometimes, the hydrophobic barrier comprises at least one of wax, polydimethylsiloxane, rubber, or silicone.

[0438] Any of the regions on the support medium can be treated with chemicals to improve the visualization of the detection spot and positive control spot on the support medium. The regions can be treated to enhance extraction of nucleic acid in the sample, to control the transport of the reacted reagents and sample or the conjugate to other regions of the support medium, or to enhance the binding of the cleaved detection moiety to the conjugate binding molecule on the surface of the conjugate or to the capture molecule in the detection region. The chemicals may comprise detergents, surfactants, buffers, salts, viscosity enhancers, or polypeptides. In some instances, the chemical comprises bovine serum albumin. In some cases, the chemicals or physical agents enhance flow of the sample with a more even flow across the width of the region. In some cases, the chemicals or physical agents provide a more even mixing of the sample across the width of the region. In some cases, the chemicals or physical agents control flow rate to be faster or slower in order to improve performance of the assay. Sometimes, the performance of the assay is measured by at least one of shorter assay time, longer times during cleavage activity, longer or shorter binding time with the conjugate, sensitivity, specificity, or accuracy.

### Multiplexing

[0439] The devices, systems, fluidic devices, kits, and methods described herein can be multiplexed in a number of ways. These methods of multiplexing are, for example, consistent with fluidic devices disclosed herein for detection of a target nucleic acid within the sample, wherein the fluidic device may comprise multiple pumps, valves, reservoirs, and chambers for sample preparation, amplification of one or more than one sequences of target nucleic acids within the sample, mixing with a programmable nuclease, and detection of a detectable signal arising from cleavage of detector nucleic acids by the programmable nuclease within the fluidic system itself.

[0440] Methods consistent with the present disclosure include a multiplexing method of assaying for a target nucleic acid in a sample. A multiplexing method comprises contacting the sample to a complex comprising a guide nucleic acid comprising a segment that is reverse complementary to a segment of the target nucleic acid and a programmable nuclease that exhibits sequence independent cleavage upon forming a complex comprising the segment of the guide nucleic acid binding to the segment of the target nucleic acid; and assaying for a signal indicating cleavage of at least some protein-nucleic acids of a population of protein-nucleic acids, wherein the signal indicates a presence of the target nucleic acid in the sample and wherein absence of the signal indicates an absence of the target nucleic acid in the sample. As another example, multiplexing method of assaying for a target nucleic acid in a sample, for example, comprises: a) contacting the sample to a complex comprising a guide nucleic acid comprising a segment that is reverse complementary to a segment of the target nucleic acid and a programmable nuclease that exhibits sequence independent cleavage upon forming a complex comprising the segment of the guide nucleic acid binding to the segment of the target nucleic acid; b) contacting the complex to a substrate; c) contacting the substrate to a reagent that differentially reacts with a cleaved substrate; and d) assaying for a signal indicating cleavage of the substrate, wherein the signal indicates a presence of the target nucleic acid in the sample and wherein absence of the signal indicates an absence of the target nucleic acid in the sample. Often, the substrate is an enzyme-nucleic acid. Sometimes, the substrate is an enzyme substrate-nucleic acid.

[0441] Multiplexing can be either spatial multiplexing wherein multiple different target nucleic acids at the same time, but the reactions are spatially separated. Often, the multiple target nucleic acids are detected using the same programmable nuclease, but different guide nucleic acids. The multiple target nucleic acids sometimes are detected using the different programmable nucleases. Sometimes, multiplexing can be single reaction multiplexing wherein multiple different target acids are detected in a single reaction volume. Often, at least two different programmable nucleases are used in single reaction multiplexing. For example, multiplexing can be enabled by immobilization of multiple categories of detector nucleic acids within a fluidic system, to enable detection of multiple target nucleic acids within a single fluidic system. Multiplexing allows for detection of multiple target nucleic acids in one kit or system. In some cases, the multiple target nucleic acids comprise different target nucleic acids to a virus, such as an influenza virus. In some cases, the multiple target nucleic acids comprise different target nucleic acids associated withinfluenza and another disease (e.g., sepsis or a respiratory infection, such as an upper respiratory tract virus). Multiplexing for one disease increases at least one of sensitivity, specificity, or accuracy of the assay to detect the presence of the disease in the sample. In some cases, the multiple target nucleic acids comprise target nucleic acids directed to different viruses, bacteria, or pathogens responsible for more than one disease. In some cases, multiplexing allows for discrimination between multiple target nucleic acids, such as target nucleic acids that comprise different genotypes of the same bacteria or pathogen responsible for a disease, for example, for a wild-type genotype of a bacteria or pathogen and for genotype of a bacteria or pathogen comprising a mutation, such as a single nucleotide polymorphism (SNP) that can confer resistance to a treatment, such as antibiotic treatment. For example, multiplexing comprises method of assaying comprising a single assay for a microorganism species using a first programmable nuclease and an antibiotic resistance pattern in a microorganism using a second programmable nuclease. Sometimes, multiplexing allows for discrimination between multiple target nucleic acids of different influenza strains, for example, influenza A and influenza B. Often, multiplexing allows for discrimination between multiple target nucleic acids, such as target nucleic acids that comprise different genotypes, for example, for a wild-type genotype and for SNP genotype. Multiplexing for multiple viral infections provides the capability to test a panel of diseases from a single sample. For example, multiplexing for multiple diseases can be valuable in a broad panel testing of a new patient or in epidemiological surveys. Often multiplexing is used for identifying bacterial pathogens in sepsis or other diseases associated with multiple pathogens.

[0442] Furthermore, signals from multiplexing can be quantified. For example, a method of quantification for a disease panel comprises assaying for a plurality of unique target nucleic acids in a plurality of aliquots from a sample, assaying for a control nucleic acid control in a second aliquot of the sample, and quantifying a plurality of signals of the plurality of unique target nucleic acids by measuring signals produced by cleavage of detector nucleic acids compared to the signal produced in the second aliquot. Often the plurality of unique target nucleic acids are from a plurality of viruses in the sample. Sometimes the quantification of a signal of the plurality correlates with a concentration of a unique target nucleic acid of the plurality for the unique target nucleic acid of the plurality that produced the signal of the plurality. The disease panel can be for any disease, such as influenza.

[0443] The devices, systems, fluidic devices, kits, and methods described herein can be multiplexed by various configurations of the reagents and the support medium. In some cases, the kit or system is designed to have multiple support mediums encased in a single housing. Sometimes, the multiple support mediums housed in a single housing share a single sample pad. The single sample pad may be connected to the support mediums in various designs such as a branching or a radial formation. Alternatively, each of the multiple support mediums has its own sample pad. In some cases, the kit or system is designed to have a single support medium encased in a housing, where the support medium comprises multiple detection spots for detecting multiple target nucleic acids. Sometimes, the reagents for multiplexed assays comprise multiple guide nucleic acids, multiple programmable nucleases, and multiple single stranded detector nucleic acids, where a combination of one of the guide nucleic acids, one of the programmable nucleases, and one of the single stranded detector nucleic acids detects one target nucleic acid and can provide a detection spot on the detection region. In some cases, the combination of a guide nucleic acid, a programmable nuclease, and a single stranded detector nucleic acid configured to detect one target nucleic acid is mixed with at least one other combination in a single reagent chamber. In some cases, the combination of a guide nucleic acid, a programmable nuclease, and a single stranded detector nucleic acid configured to detect one target nucleic acid is mixed with at least one other combination on a single support medium. When these combinations of reagents are contacted with the sample, the reaction for the multiple target nucleic acids occurs simultaneously in the same medium or reagent chamber. Sometimes, this reacted sample is applied to the multiplexed support medium described herein.

[0444] In some cases, the combination of a guide nucleic acid, a programmable nuclease, and a single stranded detector nucleic acid configured to detect one target nucleic acid is provided in its own reagent chamber or its own support medium. In this case, multiple reagent chambers or support mediums are provided in the device, kit, or system, where one reagent chamber is designed to detect one target nucleic acid. In this case, multiple support mediums are used to detect the panel of viral infections, or other diseases of interest.

[0445] In some instances, the multiplexed devices, systems, fluidic devices, kits, and methods detect at least 2 different target nucleic acids in a single reaction. In some instances, the multiplexed devices, systems, fluidic devices, kits, and methods detect at least 3 different target nucleic acids in a single reaction. In some instances, the multiplexed devices, systems, fluidic devices, kits, and methods detect at least 4 different target nucleic acids in a single reaction. In some instances, the multiplexed devices, systems, fluidic devices, kits, and methods detect at least 5 different target nucleic acids in a single reaction. In some cases, the multiplexed devices, systems, fluidic devices, kits, and methods detect at least 6, 7, 8, 9, or 10 different target nucleic acids in a single reaction. In some instances, the multiplexed kits detect at least 2 different target nucleic acids in a single kit. In some instances, the multiplexed kits detect at least 3 different target nucleic acids in a single kit. In some instances, the multiplexed kits detect at least 4 different target nucleic acids in a single kit. In some instances, the multiplexed kits detect at least 5 different target nucleic acids in a single kit. In some instances, the multiplexed kits detect at least 6, 7, 8, 9, or 10 different target nucleic acids in a single kit.

### Housing

[0446] A support medium as described herein can be housed in a number of ways that are consistent with the devices, systems, fluidic devices, kits, and methods disclosed herein. The housing for the support medium are, for example, consistent with fluidic devices disclosed herein for detection of a target nucleic acid within the sample, wherein the fluidic device may comprise multiple pumps, valves, reservoirs, and chambers for sample preparation, amplification of a target nucleic acid within the sample, mixing with a programmable nuclease, and detection of a detectable signal arising from cleavage of detector nucleic acids by the programmable nuclease within the fluidic system itself. For example, the fluidic device may be comprise support mediums to channel the flow of fluid from one chamber to another and wherein the entire fluidic device is encased within the housing described herein. Typically, the support medium described herein is encased in a housing to protect the support medium from contamination and from disassembly. The housing can be made of more than one part and assembled to encase the support medium. In some instances, a single housing can encase more than one support medium. The housing can be made from cardboard, plastics, polymers, or materials that provide mechanical protection for the support medium. Often, the material for the housing is inert or does not react with the support medium or the reagents placed on the support medium. The housing may have an upper part which when in place exposes the sample pad to receive the sample and has an opening or window above the detection region to allow the results of the lateral flow assay to be read. The housing may have guide pins on its inner surface that are placed around and on the support medium to help secure the compartments and the support medium in place within the housing. In some cases, the housing encases the entire support medium. Alternatively, the sample pad of the support medium is not encased and is left exposed to facilitate the receiving of the sample while the rest of the support medium is encased in the housing.

[0447] The housing and the support medium encased within the housing may be sized to be small, portable, and hand held. The small size of the housing and the support medium would facilitate the transport and use of the assay in remote regions or low resource settings. In some cases, the housing has a length of no more than 30 cm, 25 cm, 20 cm, 15 cm, 10 cm, or 5 cm. In some cases, the housing has a length of at least 1 cm, 5 cm, 10 cm, 15 cm, 20 cm, 25 cm, or 30 cm. In some cases, the housing has a width of no more than 30 cm, 25 cm, 20 cm, 15 cm, 10 cm, 5 cm, 4 cm, 3 cm, 2 cm, or 1 cm. In some cases, the housing has a width of at least 1 cm, 2 cm, 3 cm, 4 cm, 5 cm, 10 cm, 15 cm, 20 cm, 25 cm, or 30 cm. In some cases, the housing has a height of no more than 10 cm, 9 cm, 8 cm, 7 cm, 6 cm, 5 cm, 4 cm, 3 cm, 2 cm, or 1 cm. In some cases, the housing has a height of at least 1 cm, 2 cm, 3 cm, 4 cm, 5 cm, 6 cm, 7 cm, 8 cm, 9 cm, or 10 cm. Typically, the housing is rectangular in shape.

[0448] The housing may comprise more than one piece. The housing may comprise an over-molding. The housing may seal a chamber, channel, compartment, or valve from the surrounding environment. The housing may be comprise sealable materials, such as polycarbonate capable of laser bonding. The housing may comprise a rigid material. The housing may comprise a flexible material. The housing may comprise connectors or adaptors. A set of connectors or adaptors may have tight tolerances. A set of connectors or adaptors may have loose tolerances.

[0449] In some instances, the housing provides additional information on the outer surface of the upper cover to facilitate the identification of the test type, visualization of the detection region, and analysis of the results. The upper outer housing may have identification label including but not limited to barcodes, QR codes, identification label, or other visually identifiable labels. In some instances, the identification label is imaged by a camera on a mobile device, and the image is analyzed to identify the disease that is being tested for. The correct identification of the test is important to accurately visualize and analyze the results. In some instances, the upper outer housing has fiduciary markers to orient the detection region to distinguish the positive control spot from the detection spots. In some instances, the upper outer housing has a color reference guide. When the detection region is imaged with the color reference guide, the detection spots, located using the fiduciary marker, can be compared with the positive control spot and the color reference guide to determine various image properties of the detection spot such as color, color intensity, and size of the spot. In some instances, the color reference guide has red, green, blue, black, and white colors. In some cases, the image of the detection spot can be normalized to at least one of the reference colors of the color reference guide, compared to at least two of the reference colors of the color reference guide, and generate a value for the detection spot. Sometimes, the comparison to at least two of the reference colors is comparison to a standard reference scale. In some instance, the image of the detection spot in some instance undergoes transformation or filtering prior to analysis. Analysis of the image properties of the detection spot can provide information regarding presence or absence of the target nucleic acid targeted by the assay and the disease associated with the target nucleic acid. In some instances, the analysis provides a qualitative result of presence or absence of the target nucleic acid in the sample. In some instances, the analysis provides a semi-quantitative or quantitative result of the level of the target nucleic acid present in the sample. Quantification may be performed by having a set of standards in spots/wells and comparing the test sample to the range of standards. A more semi-quantitative approach may be performed by calculating the color intensity of 2 spots/well compared to each other and measuring if one spot/well is more intense than the other. Sometimes, quantification is of quantification of circulating nucleic acid. The circulating nucleic acid can comprise a target nucleic acid. For example, a method of circulating nucleic acid quantification comprises assaying for a target nucleic acid of circulating nucleic acid in a first aliquot of a sample, assaying for a control nucleic acid in a second aliquot of the sample, and quantifying the target nucleic acid target in the first aliquot by measuring a signal produced by cleavage of a detector nucleic acid. Sometimes, a method of circulating RNA quantification comprises assaying for a target nucleic acid of the circulating RNA in a first aliquot of a sample, assaying for a control nucleic acid in a second aliquot of the sample, and quantifying the target nucleic acid target in the first aliquot by measuring a signal produced by cleavage of a detector nucleic acid. Often, the output comprises fluorescence/second. The reaction rate, sometimes, is log linear for output signal and target nucleic acid concentration. In some instances, the signal output is correlated with the target nucleic acid concentration. Sometimes, the circulating nucleic acid is DNA.

### Detection/Visualization Devices

[0450] A number of detection or visualization devices and methods are consistent with the devices, systems, fluidic devices, kits, and methods disclosed herein. Methods of detection/visualization are, for example, consistent with fluidic devices disclosed herein for detection of a target nucleic acid within the sample, wherein the fluidic device may comprise multiple pumps, valves, reservoirs, and chambers for sample preparation, amplification of a target nucleic acid within the sample, mixing with a programmable nuclease, and detection of a detectable signal arising from cleavage of detector nucleic acids by the programmable nuclease within the fluidic system itself. For example, the fluidic device may comprise an incubation and detection chamber or a stand-alone detection chamber, in which a colorimetric, fluorescence, electrochemical, or electrochemiluminesence signal is generated for detection/visualization. Sometimes, the signal generated for detection is a calorimetric, potentiometric, amperometric, optical (e.g., fluorescent, colorimetric, etc.), or piezo-electric signal. Often a calorimetric signal is heat produced after cleavage of the detector nucleic acids. Sometimes, a calorimetric signal is heat absorbed after cleavage of the detector nucleic acids. A potentiometric signal, for example, is electrical potential produced after cleavage of the detector nucleic acids. An amperometric signal can be movement of electrons produced after the cleavage of detector nucleic acid. Often, the signal is an optical signal, such as a colorimetric signal or a fluorescence signal. An optical signal is, for example, a light output produced after the cleavage of the detector nucleic acids. Sometimes, an optical signal is a change in light absorbance between before and after the cleavage of detector nucleic acids. Often, a piezo-electric signal is a change in mass between before and after the cleavage of the detector nucleic acid. Sometimes, the detector nucleic acid is protein-nucleic acid. Often, the protein-nucleic acid is an enzyme-nucleic acid. The detection/visualization can be analyzed using various methods, as further described below. The results from the detection region from a completed assay can be visualized and analyzed in various ways. In some cases, the positive control spot and the detection spot in the detection region is visible by eye, and the results can be read by the user. In some cases, the positive control spot and the detection spot in the detection region is visualized by an imaging device. Often, the imaging device is a digital camera, such a digital camera on a mobile device. The mobile device may have a software program or a mobile application that can capture an image of the support medium, identify the assay being performed, detect the detection region and the detection spot, provide image properties of the detection spot, analyze the image properties of the detection spot, and provide a result. Alternatively or in combination, the imaging device can capture fluorescence, ultraviolet (UV), infrared (IR), or visible wavelength signals. The imaging device may have an excitation source to provide the excitation energy and captures the emitted signals. In some cases, the excitation source can be a camera flash and optionally a filter. In some cases, the imaging device is used together with an imaging box that is placed over the support medium to create a dark room to improve imaging. The imaging box can be a cardboard box that the imaging device can fit into before imaging. In some instances, the imaging box has optical lenses, mirrors, filters, or other optical elements to aid in generating a more focused excitation signal or to capture a more focused emission signal. Often, the imaging box and the imaging device are small, handheld, and portable to facilitate the transport and use of the assay in remote or low resource settings.

[0451] In some cases, detection or visualization may comprise the production of light by a diode. In some cases, a diode may produce visible light. In some cases, a diode may produce infrared light. In some cases, a diode may produce ultraviolet light. In some cases, a diode may be capable of producing different wavelengths or spectra of light. A diode may produce light over a broad or narrow spectrum. A diode may produce white light covering a large portion of the visible spectrum. A diode may produce a specific wavelength of light (e.g., a roughly Gaussian or Lorentzian wavelength vs intensity profile centered around a particular wavelength). In some cases, the bandwidth of light produced by a diode may be defined as the full width at half maximum intensity of a Gaussian-like or Lorentzian-like band. Some diodes produce light with narrow emission bandwidths. A diode may produce light with less than a 1 nm bandwidth. A diode may produce light with less than a 5 nm bandwidth. A diode may produce light with less than a 10 nm bandwidth. A diode may produce light with less than a 20 nm bandwidth. A diode may produce light with less than a 30 nm bandwidth. A diode may produce light with less than a 50 nm bandwidth. A diode may produce light with less than a 100 nm bandwidth. A diode may produce light with less than a 150 nm bandwidth. A diode may produce light with less than a 200 nm bandwidth.

[0452] In some cases, detection or visualization may comprise light detection by a diode (e.g., a photodiode). The current produced by a diode may be used to determine characteristics of light absorbed, including polarization, wavelength, intensity, direction traveled, point of origin, or any combination thereof. In some cases, detection or visualization may comprise light detection by a camera (e.g., a charge coupled device (CCD) detector) or a metal—oxide—semiconductor (MOS) detector). A detector (e.g., a photodiode, a CCD detector, or a MOS detector) may be configured to detect a bandwidth of light. In some cases, the bandwidth of light detected by a detector may be defined as the full width at half maximum intensity of a Gaussian-like or Lorentzian-like band. In some cases, the bandwidth of light detected by a detector may be narrowed by an emission filter positioned between the sample and the detector. The emission filter may be a long pass filter. The emission filter may be bandpass filter. The emission filter may be a notch filter. In some embodiments, the bandwidth of light detected by the detector may be less than about 300 nm, less than about 200 nm, less than about 100 nm, less than about 75 nm, less than about 50 nm, less than about 40 nm, less than about 30 nm, less than about 20 nm, less than about 10 nm, or less than about 5 nm.

[0453] In some cases, a diode array may be used to excite and detect fluorescence from a sample. In some cases, a device may comprise a light producing diode and detector diode positioned to illuminate and detect light from a particular portion of a sample. In some cases, a device may comprise a light producing diode and detector diode positioned to illuminate and detect light from a particular sample compartment or chamber.

[0454] The assay described herein can be visualized and analyzed by a mobile application (app) or a software program. Using the graphic user interface (GUI) of the app or program, an individual can take an image of the support medium, including the detection region, barcode, reference color scale, and fiduciary markers on the housing, using a camera on a mobile device. The program or app reads the barcode or identifiable label for the test type, locate the fiduciary marker to orient the sample, and read the detectable signals, compare against the reference color grid, and determine the presence or absence of the target nucleic acid, which indicates the presence of the gene, virus, or the agent responsible for the disease. The mobile application can present the results of the test to the individual. The mobile application can store the test results in the mobile application. The mobile application can communicate with a remote device and transfer the data of the test results. The test results can be viewable remotely from the remote device by another individual, including a healthcare professional. A remote user can access the results and use the information to recommend action for treatment, intervention, clean up of an environment.

### Manufacturing

[0455] The support medium may be assembled with a variety of materials and reagents. Reagents may be dispensed or coated on to the surface of the material for the support medium. The material for the support medium may be laminated to a backing card, and the backing card may be singulated or cut into individual test strips. The device may be manufactured by completely manual, batch-style processing; or a completely automated, in-line continuous process; or a hybrid of the two processing approaches. The batch process may start with sheets or rolls of each material for the support medium. Individual zones of the support medium may be processed independently for dispensing and drying, and the final support medium may be assembled with the independently prepared zones and cut. The batch processing scheme may have a lower cost of equipment, and a higher labor cost than more automated in-line processing, which may have higher equipment costs. In some instances, batch processing may be preferred for low volume production due to the reduced capital investment. In some instances, automated in-line processing may be preferred for high volume production due to reduced production time. Both approaches may be scalable to production level.

[0456] In some instances, the support mediums are prepared using various instruments, including an XYZ-direction motion system with dispensers, impregnation tanks, drying ovens, a manual or semi-automated laminator, and cutting methods for reducing roll or sheet stock to appropriate lengths and widths for lamination. For dispensing the conjugate binding molecules for the conjugate zone and capture molecules for the detection zones, an XYZ-direction motion system with dispensers may be used. In some embodiments, the dispenser may dispense by a contact method or a non-contact method.

[0457] In automated or semi-automated preparation of the support medium, the support medium may be prepared from rolls of membranes for each region that are ordered into the final assembled order and unfurled from the rolls. For example, the membranes can be ordered from sample pad region to collection pad region from left to right with one membrane corresponding to a region on the support medium, all onto an adhesive cardstock. The dispenser places the reagents, conjugates, detection molecules, and other treatments for the membrane onto the membrane. The dispensed fluids are dried onto the membranes by heat, in a low humidity chamber, or by freeze drying to stabilize the dispensed molecules. The membranes are cut into strips and placed into the housing and packaged.

### Detection of a Target Nucleic Acid in a Fluidic Device

[0458] Disclosed herein are various fluidic devices for detection of a target nucleic acid of interest in a biological sample. The fluidic devices described in detail below can be used to monitor the reaction of target nucleic acids in samples with a programmable nuclease, thereby allowing for the detection of said target nucleic acid. All samples and reagents disclosed herein are compatible for use with a fluidic device disclosed below. Any programmable nuclease, such as any Cas nuclease described herein, are compatible for use with a fluidic device disclosed below. Support mediums and housing disclosed herein are also compatible for use in conjunction with the fluidic devices disclosed below. Multiplexing detection, as described throughout the present disclosure, can be carried out within the fluidic devices disclosed herein. Compositions and methods for detection and visualization disclosed herein are also compatible for use within the below described fluidic systems.

[0459] In the below described fluidic systems, any programmable nuclease (e.g., CRISPR-Cas) reaction can be monitored. For example, any programmable nuclease disclosed herein can be used to cleave the reporter molecules to generate a detection signal. In some cases, the programmable nuclease is Cas13. Sometimes the Cas13 is Cas13a, Cas13b, Cas13c, Cas13d, or Cas13e. In some cases, the programmable nuclease is Mad7 or Mad2. In some cases, the programmable nuclease is Cas12. Sometimes the Cas12 is Cas12a, Cas12b, Cas12c, Cas12d, or Cas12e. In some cases, the programmable nuclease is Csm1, Cas9, C2c4, C2c8, C2c5, C2c10, C2c9, or CasZ. Sometimes, the Csm1 is also called smCms1, miCms1, obCms1, or suCms1. Sometimes Cas13a is also called C2c2. Sometimes CasZ is also called Cas14a, Cas14b, Cas14c, Cas14d, Cas14e, Cas14f, Cas14g, or Cas14h. Sometimes, the programmable nuclease is a type V CRISPR-Cas system. In some cases, the programmable nuclease is a type VI CRISPR-Cas system. Sometimes the programmable nuclease is a type III CRISPR-Cas system. In some cases, the programmable nuclease is from at least one of Leptotrichia shahii (Lsh), Listeria seeligeri (Lse), Leptotrichia buccalis (Lbu), Leptotrichia wadeu (Lwa), Rhodobacter capsulatus (Rca), Herbinix hemicellulosilytica (Hhe), Paludibacter propionicigenes (Ppr), Lachnospiraceae bacterium (Lba), [Eubacterium] rectale (Ere), Listeria newyorkensis (Lny), Clostridium aminophilum (Cam), Prevotella sp. (Psm), Capnocytophaga canimorsus (Cca, Lachnospiraceae bacterium (Lba), Bergeyella zoohelcum (Bzo), Prevotella intermedia (Pin), Prevotella buccae (Pbu), Alistipes sp. (Asp), Riemerella anatipestifer (Ran), Prevotella aurantiaca (Pau), Prevotella saccharolytica (Psa), Prevotella intermedia (Pint), Capnocytophaga canimorsus (Cca), Porphyromonas gulae (Pgu), Prevotella sp. (Psp), Porphyromonas gingivalis (Pig), Prevotella intermedia (Pin3), Enterococcus italicus (Ei), Lactobacillus salivarius (Ls), or Thermus thermophilus (Tt). Sometimes the Cas13 is at least one of LbuCas13a, LwaCas13a, LbaCas13a, HheCas13a, PprCas13a, EreCas13a, CamCas13a, or LshCas13a.

[0460] A workflow of a method for detecting a target nucleic acid in a sample within a fluidic device can include sample preparation, nucleic acid amplification, incubation with a programmable nuclease, and/or detection (readout). FIG. 1 shows a schematic illustrating a workflow of a programmable nuclease reaction. Step 1 shown in the workflow is sample preparation, Step 2 shown in the workflow is nucleic acid amplification. Step 3 shown in the workflow is programmable nuclease incubation. Step 4 shown in the workflow is detection (readout). Non-essential steps are shown as oval circles. Steps 1 and 2 are optional, and steps 3 and 4 can occur concurrently, if incubation and detection of programmable nuclease activity are within the same chamber. Sample preparation and amplification can be carried out within a fluidic device described herein or, alternatively, can be carried out prior to introduction into the fluidic device. As mentioned above, sample preparation of any nucleic acid amplification are optional, and can be excluded. In further cases, programmable nuclease reaction incubation and detection (readout) can be performed sequentially (one after another) or concurrently (at the same time). In some embodiments, sample preparation and/or amplification can be performed within a first fluidic device and then the sample can be transferred to a second fluidic device to carry out Steps 3 and 4 and, optionally, Step 2.

[0461] Workflows and systems compatible with the compositions and methods provided herein include one-pot reactions and two-pot reactions. In a one-pot reaction, amplification, reverse transcription, amplification and reverse transcription, or amplification and in vitro transcription, and detection can be carried out simultaneously in one chamber. In other words, in a one-pot reaction, any combination of reverse transcription, amplification, and in vitro transcription can be performed in the same reaction as detection. In a two-pot reaction, any combination of reverse transcription, amplification, and in vitro transcription can be performed in a first reaction, followed by detection in a second reaction. The one-pot or two-pot reactions can be carried out in any of the chambers of the devices disclosed herein.

[0462] A fluidic device for sample preparation can be referred to as a filtration device. In some embodiments, the filtration device for sample preparation resembles a syringe or, comprises, similar functional elements to a syringe. For example, a functional element of the filtration device for sample preparation includes a narrow tip for collection of liquid samples. Liquid samples can include blood, saliva, urine, or any other biological fluid. Liquid samples can also include liquid tissue homogenates. The tip, for collection of liquid samples, can be manufactured from glass, metal, plastic, or other biocompatible materials. The tip may be replaced with a glass capillary that may serve as a metering apparatus for the amount of biological sample added downstream to the fluidic device. For some samples, e.g., blood, the capillary may be the only fluidic device required for sample preparation. Another functional element of the filtration device for sample preparation may include a channel that can carry volumes from nL to mL, containing lysis buffers compatible with the programmable nuclease reaction downstream of this process. The channel may be manufactured from metal, plastic, or other biocompatible materials. The channel may be large enough to hold an entire fecal, buccal, or other biological sample collection swab. The filtration device may further contain a solution of reagents that will lyse the cells in each type of samples and release the nucleic acids so that they are accessible to the programmable nuclease. Active ingredients of the solution may be chaotropic agents, detergents, salts, and can be of high osmolality, ionic strength and pH. Chaotropic agents or chaotropes are substances that disrupt the three-dimensional structure in macromolecules such as proteins, DNA, or RNA. One example protocol comprises a 4 M guanidinium isothiocyanate, 25 mM sodium citrate. 2H₂O, 0.5% (w/v) sodium lauryl sarcosinate, and 0.1 M β-mercaptoethanol), but numerous commercial buffers for different cellular targets may also be used. Alkaline buffers may also be used for cells with hard shells, particularly for environmental samples. Detergents such as sodium dodecyl sulphate (SDS) and cetyl trimethylammonium bromide (CTAB) may also be implemented to chemical lysis buffers. Cell lysis may also be performed by physical, mechanical, thermal or enzymatic means, in addition to chemically-induced cell lysis mentioned previously. The device may include more complex architecture depending on the type of sample, such as nanoscale barbs, nanowires, sonication capability in a separate chamber of the device, integrated laser, integrated heater, for example, a Peltier-type heater, or a thin-film planar heater, and/or microcapillary probes for electrical lysis. Any samples described herein can be used in this workflow. For example samples may include liquid samples collected from a subject being tested for a condition of interest. FIG. 2 shows an example fluidic, or filtration, device for sample preparation that may be used in Step 1 of the workflow schematic of 1. The sample preparation fluidic device shown in this figure can process different types of biological sample: finger-prick blood, urine or swabs with fecal, cheek or other collection.

[0463] A fluidic device may be used to carry out any one of, or any combination of, Steps 2-4 of FIG. 1 (nucleic acid amplification, programmable nuclease reaction incubation, detection (readout)). FIG. 3 shows an example fluidic device for a programmable nuclease reaction with a fluorescence or electrochemical readout that may be used in Step 2 to Step 4 of the workflow schematic of FIG. 1. This figure shows that the device performs three iterations of Steps 2 through 4 of the workflow schematic of FIG. 1. At top, is one variation of this fluidic device, which performs the programmable nuclease reaction incubation and detection (readout) steps, but not amplification. Shown in the middle is another variation of said fluidic device, comprising a one-chamber reaction with amplification. Shown at bottom is yet another variation of the fluidic device, comprising a two-chamber reaction with amplification. An exploded view diagram summarizing the fluorescence and electrochemical processes that may be used for detection of the reaction are shown in FIG. 4.

[0464] A fluidic device may comprise a plurality of chambers and types of chambers. A fluidic device may comprise a plurality of chambers configured to contain a sample with reagents and in conditions conducive to a particular type of reaction. Such a chamber may be designed to facilitate detection of a reaction or a reaction species (e.g., by having transparent surfaces so that the contents of the chamber can be monitored by an external fluorimeter, or by having electrodes capable of potentiometric analysis). A fluidic device may comprise an amplification chamber, which can be designed to contain a sample and reagents in conditions (e.g., temperature) suitable for an amplification reaction. A fluidic device may comprise a detection chamber, which may be designed to contain a sample with reagents in conditions suitable for a detection reaction (e.g., a colorimetric reaction or a DETECTR reaction). A fluidic device may also comprise chambers designed to store or transfer reagents. For example, a fluidic device may comprise an amplification reagent chamber designed to hold reagents for an amplification reaction (e.g., LAMP) or a detection reagent chamber designed to hold reagents for a reaction capable of detecting the presence or absence of a species (e.g., a DETECTR reaction). A fluidic device may comprise a chamber configured for multiple purposes (e.g., a chamber may be configured for storing a reagent, containing two types of samples for two separate types of reactions, and facilitating fluorescence detection).

[0465] A fluidic device may comprise a sample inlet (the term ‘sample inlet’ is herein used interchangeably with sample inlet port and sample collection port) that leads to an internal space within the fluidic device, such as a chamber or fluidic channel. A sample inlet may lead to a chamber within the fluidic device. A sample inlet may be capable of sealing. A sample inlet may be sealed such that fluid is prevented from passing through the sample inlet. In some cases, a sample inlet seals around a second apparatus designed to deliver a sample, thus sealing the sample inlet from the surrounding environment. For example, a sample inlet may be capable of sealing around a swab or syringe. A sample inlet may also be configured to accommodate a cap or other mechanism that covers or seals the A sample inlet may comprise a bendable or breakable component. For example, a sample inlet may comprise a seal that breaks upon sample insertion. In some cases, a seal within a sample inlet releases reagents upon breaking. A sample inlet may comprise multiple chambers or compartments. For example, a sample inlet may comprise an upper compartment and a lower compartment separated by a breakable plastic seal. The seal may break upon sample insertion, releasing contents (e.g., lysis buffer or amplification buffer) from the upper container into the lower container, where it may mix with the sample and elute into a separate compartment (e.g., a sample compartment) within the fluidic device.

[0466] In some embodiments, the fluidic device may be a pneumatic device. The pneumatic device may comprise one or more sample chambers connected to one or more detection chambers by one or more pneumatic valves. Optionally, the pneumatic device may further comprise one or more amplification chamber between the one or more sample chambers and the one or more detection chambers. The one or more amplification chambers may be connected to the one or more sample chambers and the one or more detection chambers by one or more pneumatic valves. A pneumatic valve may be made from PDMS, or any other suitable material. A pneumatic valve may comprise a channel perpendicular to a microfluidic channel connecting the chambers and allowing fluid to pass between chambers when the valve is open. In some embodiments, the channel deflects downward upon application of air pressure through the channel perpendicular to the microfluidic channel. In some embodiments, the fluidic device may be a sliding valve device. The sliding valve device may comprise a sliding layer with one or more channels and a fixed layer with one or more sample chambers and one or more detection chambers. Optionally, the fixed layer may further comprise one or more amplification chambers. In some embodiments, the sliding layer is the upper layer and the fixed layer is the lower layer. In other embodiments, the sliding layer is the lower layer and the fixed layer is the upper layer. The sliding valve device may further comprise one or more of a side channel with an opening aligned with an opening in the sample chamber, a side channel with an opening aligned with an opening in the amplification chamber, or a side channel with an opening aligned with the opening in the detection chamber. In some embodiments the side channels are connected to a mixing chamber to allow transfer of fluid between the chambers. In some embodiments, the sliding valve device comprises a pneumatic pump for mixing, aspirating, and dispensing fluid in the device.

[0467] In some embodiments, a fluidic device may comprise a sliding valve. A sliding valve may be capable of adopting multiple positions, that connect different channels or compartments in a device. In some cases, a sliding device comprises multiple sets of channels that can simultaneously connect multiple different channels or compartments. For example a device that comprises 10 amplification chambers, 10 reagent chambers, and 1 sample chamber may comprise a sliding valve that can adopt a first position connecting the sample chamber to the 10 amplification chambers through 10 separate channels, and a second position that may separately connect the 10 amplification chambers to the 10 reagent chambers. A sliding valve may be capable of automated control by a device or computer. A sliding valve may comprise a transfer fluidic channel, which can have a first end that is open to a first chamber or fluidic channel and a second end that is blocked when the sliding valve is in a first position, and can have the first end blocked and the second end open to a second chamber or fluidic channel when the sliding valve is in a second position. A sliding valve may be designed to combine the flow from two or more chambers or channels into a single chamber or channel. A sliding valve may be designed to divide the flow from a single chamber or channel into two or more separate chambers or fluidic channels.

[0468] The chip (also referred to as fluidic device) may be manufactured from a variety of different materials. Exemplary materials that may be used include plastic polymers, such as poly-methacrylate (PMMA), cyclic olefin polymer (COP), cyclic olefin copolymer (COC), polyethylene (PE), high-density polyethylene (HDPE), polypropylene (PP); glass; and silicon. Features of the chip may be manufactured by various processes. For example, features may be (1) embossed using injection molding, (2) micro-milled or micro-engraved using computer numerical control (CNC) micromachining, or non-contact laser drilling (by means of a CO2 laser source); (3) additive manufacturing, and/or (4) photolithographic methods. A chip may comprise a material or combination of materials that thermally isolate different portions of the chip (e.g., two fluidic channels or reaction chambers may be thermally isolated by intervening material between them).

[0469] A design may include a plurality of input ports operated by a plurality of pumps. For example, the design may include up to three (3) input ports operated by three (3) pumps, labelled on FIG. 3 as P1-P3. The pumps may be operated by external syringe pumps using low pressure or high pressure. The pumps may be passive, and/or active (pneumatic, piezoelectric, Braille pin, electroosmotic, acoustic, gas permeation, or other).

[0470] The ports may be connected to pneumatic pressure pumps, air or gas may be pumped into the microfluidic channels to control the injection of fluids into the fluidic device. At least three reservoirs may be connected to the device, each containing buffered solutions of: (1) sample, which may be a solution containing purified nucleic acids processed in a separate fluidic device, or neat sample (blood, saliva, urine, stool, and/or sputum); (2) amplification mastermix, which varies depending on the method used, wherein the method may include any of loop-mediated isothermal amplification (LAMP), strand displacement amplification (SDA), recombinase polymerase amplification (RPA), helicase dependent amplification (HDA), multiple displacement amplification (MDA), rolling circle amplification (RCA), and nucleic acid sequence-based amplification (NASBA), transcription mediated amplification (TMA), circular helicase dependent amplification (cHDA), exponential amplification reaction (EXPAR), ligase chain reaction (LCR), simple method amplifying RNA targets (SMART), single primer isothermal amplification (SPIA), hinge-initiated primer-dependent amplification of nucleic acids (HIP), nicking enzyme amplification reaction (NEAR), or improved multiple displacement amplification (IMDA); and (3) pre-complexed programmable nuclease mix, which includes one or more programmable nuclease and guide oligonucleotides. The method of nucleic acid amplification may also be polymerase chain reaction (PCR), which includes cycling of the incubation temperature at different levels, hence is not defined as isothermal. Often, the reagents for nucleic acid amplification comprise a recombinase, a oligonucleotide primer, a single-stranded DNA binding (SSB) protein, and a polymerase. Sometimes, nucleic acid amplification of the sample improves at least one of sensitivity, specificity, or accuracy of the assay in detecting the target nucleic acid. In some cases, the nucleic acid amplification is performed in a nucleic acid amplification region on the support medium. Alternatively or in combination, the nucleic acid amplification is performed in a reagent chamber, and the resulting sample is applied to the support medium. Sometimes, the nucleic acid amplification is isothermal nucleic acid amplification. Complex formation of a nuclease with guides (a programmable nuclease) and reporter probes may occur off the chip. An additional port for output of the final reaction products is depicted at the end of the fluidic path, and is operated by a similar pump, as the ones described for P1-P3. The reactions product can be, thus, collected for additional processing and/or characterization, e.g., sequencing.

[0471] A device may comprise a plurality of chambers, fluidic channels and valves. A device may comprise multiple types of chambers, fluidic channels, valves, or any combination thereof. A device may comprise different numbers of chambers, fluidic channels, and valves. For example, a device may comprise one sample chamber, a rotating valve connecting the sample chamber to 10 separate amplification reaction chambers, and two sliding valves controlling flow from the 10 amplification reaction chambers into 30 separate Detection chambers. A rotating valve may connect 2 or more chambers or fluidic channels. A rotating valve may connect 3 or more chambers or fluidic channels. A rotating valve may connect 4 or more chambers or fluidic channels. A rotating valve may connect 5 or more chambers or fluidic channels. A rotating valve may connect 8 or more chambers or fluidic channels. A rotating valve may connect 10 or more chambers or fluidic channels. A rotating valve may connect 15 or more chambers or fluidic channels. A rotating valve may connect 20 or more chambers or fluidic channels.

[0472] A fluidic device may comprise a plurality of channels. A fluidic device may comprise a plurality of channels comprising a plurality of dimensions and properties. A fluidic device may comprise two channels with identical lengths. A fluidic device may comprise two channels that provide identical resistance. A fluidic device may comprise two identical channels.

[0473] A fluidic device may comprise a millichannel. A millichannel may have a width of between 100 and 200 mm. A millichannel may have a width of between 50 and 100 nm. A millichannel may have a width of between 20 and 50 nm. A millichannel may have a width of between 10 and 20 nm. A millichannel may have a width of between 1 and 10 nm. A fluidic device may comprise a microchannel. A microchannel may have a width of between 800 and 990 μm. A microchannel may have a width of between 600 and 800 μm. A microchannel may have a width of between 400 and 600 μm. A microchannel may have a width of between 200 and 400 μm. A microchannel may have a width of between 100 and 200 μm. A microchannel may have a width of between 50 and 100 μm. A microchannel may have a width of between 30 and 50 μm. A microchannel may have a width of between 20 and 30 μm. A microchannel may have a width of between 10 and 20 μm. A microchannel may have a width of between 5 and 10 μm. A microchannel may have a width of between 1 and 5μm. A fluidic device may comprise a nanochannel. A nanochannel may have a width of between 800 and 990 nm. A nanochannel may have a width of between 600 and 800 nm. A nanochannel may have a width of between 400 and 600 nm. A nanochannel may have a width of between 200 and 400 nm. A nanochannel may have a width of between 1 and 200 nm. A channel may have a comparable height and width. A channel may have a greater width than height, or a narrower width than height. A channel may have a width that is 1.1, 1.2, 1.3, 1.4, 1.5, 2, 3, 4, 5, 10, 20, 30, 40, 50, 100, 500, 1000 or more times its height. A channel may have a width that is 0.9, 0.8, 0.7, 0.6, 0.5, 0.25, 0.1, 0.05, 0.01, 0.005, 0.001 times its height. A channel may have a width that is less than 0.001 times its height. A channel may have non-uniform dimensions. A channel may have different dimensions at different points along its length. A channel may divide into 2 or more separate channels. A channel may be straight, or may have bends, curves, turns, angles, or other features of non-linear shapes. A channel may comprise a loop or multiple loops.

[0474] A fluidic device may comprise a resistance channel. A resistance channel may be a channel with slow flow rates relative to other channels within the fluidic device. A resistance channel may be a channel with low volumetric flow rates relative to other channels within the fluidic device. A resistance channel may provide greater resistance to sample flow relative to other channels in the fluidic device. A resistance channel may prevent or limit sample backflow. A resistance channel may prevent or limit cross-contamination between multiple samples within a device by limiting turbulence. A resistance channel may contribute to flow stability within a fluidic device. A resistance channel may limit disparities in flow rates between multiple portions of a fluidic device. A resistance channel may stabilize flow rates within a device, and minimize flow variation over time.

[0475] The flow of liquid in a fluidic device may be controlled with a plurality of microvalves. For example, the flow of liquid in this fluidic device may be controlled using up to four (4) microvalves, labelled in FIG. 3 as V1-V4. These valves can be electro-kinetic microvalves, pneumatic microvalves, vacuum microvalves, capillary microvalves, pinch microvalves, phase-change microvalves, burst microvalves.

[0476] The flow to and from the fluidic channel from each of P1-P4 is controlled by valves, labelled as V1-V4. The volume of liquids pumped into the ports can vary from nL to mL depending in the overall size of the device.

[0477] In device iteration 2.1, shows in FIG. 3, no amplification is needed. After addition of sample and pre-complexed programmable nuclease mix in P1 and P2, respectively, the reagents may be mixed in the serpentine channel, S1, which then leads to chamber C1 where the mixture may be incubated at the required temperature and time. The readout can be done simultaneously in C1, described in FIG. 4. Thermoregulation in C1 may be carried out using a thin-film planar heater manufactured, from e.g. Kapton, or other similar materials, and controlled by a proportional integral derivative (PID).

[0478] In device iteration 2.2, shown in FIG. 3, after addition of sample, amplification mix, and pre-complexed programmable nuclease mix in P1, P2 and P3, respectively, the reagents can be mixed in the serpentine channel, S1, which then leads to chamber C1 where the mixture is incubated at the required temperature and time needed to efficient amplification, as per the conditions of the method used. The readout may be done simultaneously in C1, described in FIG. 4. Thermoregulation may be achieved as previously described.

[0479] In device iteration 2.3, shown in FIG. 3, amplification and programmable nuclease reactions occur in separate chambers. The pre-complexed programmable nuclease mix is pumped into the amplified mixture from C1 using pump P3. The liquid flow is controlled by valve V3, and directed into serpentine mixer S2, and subsequently in chamber C2 for incubation the required temperature, for example at 37° C. for 90 minutes.

[0480] During the detection step (shown as step 4 in the workflow diagram of FIG. 1), the Cas-gRNA complex binds to its matching nucleic acid target from the amplified sample and is activated into a non-specific nuclease, which cleaves a nucleic acid-based reporter molecule to generate a signal readout. In the absence of a matching nucleic acid target, the Cas-gRNA complex does not cleave the nucleic acid-based reporter molecule. Real-time detection of the Cas reaction can be achieved by three methods: (1) fluorescence, (2) electrochemical detection, and (3) electrochemiluminescence. All three methods are described below and a schematic diagrams of these processes is shown in FIG. 4. Detection of the signal can be achieved by multiple methods, which can detect a signal that is calorimetric, potentiometric, amperometric, optical (e.g., fluorescent, colorometric, etc.), or piezo-electric, as non-limiting examples.

[0481] FIG. 4 shows schematic diagrams of a readout process that may be used in conjunction with a fluidic device (e.g., the fluidic device of FIG. 3), including (a) fluorescence readout and (b) electrochemical readout. The emitted fluorescence of cleaved reporter oligo nucleotides may be monitored using a fluorimeter positioned directly above the detection and incubation chamber. The fluorimeter may be a commercially available instrument, the optical sensor of a mobile phone or smart phone, or a custom-made optical array comprising of fluorescence excitation means, e.g. CO₂, other, laser and/or light emitting diodes (LEDs), and fluorescence detection means e.g. photodiode array, phototransistor, or others. A device may comprise a chamber comprising transparent or translucent materials that allow light to pass in and out of the chamber.

[0482] The fluorescence detection and excitation may be multiplexed, wherein, for example, fluorescence detection involves exciting and detecting more than one fluorophore in the incubation and detection chamber (C1 or C2). The fluorimeter itself may be multichannel, in which detecting and exciting light at different wavelengths, or more than one fluorimeter may be used in tandem, and their position above the incubation and detection chamber (C1 and C2) be modified by mechanical means, such as a motorized mechanism using micro or macro controllers and actuators (electric, electronic, and/or piezo-electric).

[0483] Two electrochemical detection variations are described herein, using integrated working, counter and reference electrodes in the incubation and detection chamber (C1 or C2):

[0484] Increase in signal. The progress of the cleavage reaction catalyzed by the programmable nuclease may be detected using a streptavidin-biotin coupled reaction. The top surface of the detection and incubation chamber may be functionalized with nucleic acid molecules (ssRNA, ssDNA or ssRNA/DNA hybrid molecules) conjugated with a biotin moiety. The bottom surface of the detection and incubation chamber operates as an electrode, comprising of working, reference, and counter areas, manufactured (or screen-printed) from carbon, graphene, silver, gold, platinum, boron-doped diamond, copper, bismuth, titanium, antimony, chromium, nickel, tin, aluminum, molybdenum, lead, tantalum, tungsten, steel, carbon steel, cobalt, indium tin oxide (ITO), ruthenium oxide, palladium, silver-coated copper, carbon nano-tubes, or other metals. The bottom surface of the detection and incubation chamber may be coated with streptavidin molecules. In the absence of any biotin molecules, the current measured by a connected electrochemical analyzer (commercial, or custom-made) is low. When the pre-complexed programmable nuclease mix with amplified target flows in the detection and incubation chamber, and is activated at a higher temperature, for example at 37° C., cleavage of the single-stranded nucleic acid (ssNA) linker releases biotin molecules that can diffuse onto the streptavidin-coated bottom surface of the detection and incubation chamber. Because of the interaction of biotin and streptavidin molecules, an increase in the current is read by a coupled electrochemical analyzer.

[0485] In some cases, reporter cleavage may increase the intensity of an electrochemical signal (e.g., a potentiometric signal from a square wave or cyclic voltammogram). Reporter cleavage may increase the diffusion constant of an electroactive moiety in the reporter, which can lead to an increase of an electrochemical signal. Thus, in some cases, electrochemical signal increase proportional to the degree of transcollateral reporter cleavage.

[0486] Some DETECTR experiments may be sensitive to small changes in cleaved reporter concentration, allowing low concentrations of target nucleic acid to be detected or distinguished. An electrochemical DETECTR assay (a DETECTR assay that utilizes electrochemical detection) may be capable to detecting less than 100 nM target nucleic acid. An electrochemical DETECTR assay may be capable to detecting less than 10 nM target nucleic acid. An electrochemical DETECTR assay may be capable to detecting less than 1 nM target nucleic acid. An electrochemical DETECTR assay may be capable to detecting less than 100 pM target nucleic acid. An electrochemical DETECTR assay may be capable to detecting less than 10 pM target nucleic acid. An electrochemical DETECTR assay may be capable to detecting less than 1 pM target nucleic acid. An electrochemical DETECTR assay may be capable to detecting less than 100 fM target nucleic acid. An electrochemical DETECTR assay may be capable to detecting less than 50 fM target nucleic acid. An electrochemical DETECTR assay may be capable to detecting less than 10 fM target nucleic acid. An electrochemical DETECTR assay may be capable to detecting less than 1 fM target nucleic acid. In some cases, an electrochemical detection may be more sensitive than fluorescence detection. In some cases, a DETECTR assay with electrochemical detection may have a lower detection limit than a DETECTR assay that utilizes fluorescence detection.

[0487] In some cases, an electrochemical DETECTR reaction may require low reporter concentrations. In some cases, an electrochemical DETECTR reaction may require low reporter concentrations. An electrochemical DETECTR reaction may require less than 10 μM reporter. An electrochemical DETECTR reaction may require less than 1 μM reporter. An electrochemical DETECTR reaction may require less than 100 nM reporter. An electrochemical DETECTR reaction may require less than 10 nM reporter. An electrochemical DETECTR reaction may require less than 1 nM reporter. An electrochemical DETECTR reaction may require less than 100 pM reporter. An electrochemical DETECTR reaction may require less than 10 pM reporter. An electrochemical DETECTR reaction may require less than 1 pM reporter.

[0488] Other types of signal amplification that use enrichment may also be used apart from biotin-streptavidin excitation. Non-limiting examples are: (1) glutathione, glutathione S-transferase, (2) maltose, maltose-binding protein, (3) chitin, chitin-binding protein.

[0489] Decrease in signal. The progress of the programmable nuclease cleavage reaction may be monitored by recording the decrease in the current produced by a ferrocene (Fc), or other electroactive mediator moieties, conjugated to the individual nucleotides of nucleic acid molecules (ssRNA, ssDNA or ssRNA/DNA hybrid molecules) immobilized on the bottom surface of the detection and incubation chamber. In the absence of the amplified target, the programmable nuclease complex remains inactive, and a high current caused by the electroactive moieties is recorded. When the programmable nuclease complex with guides flows in the detection and incubation chamber and is activated by the matching nucleic acid target at 37° C., the programmable nuclease complex non-specifically degrades the immobilized Fc-conjugated nucleic acid molecules. This cleavage reaction decreases the number of electroactive molecules and, thus, leads to a decrease in recorded current.

[0490] The electrochemical detection may also be multiplexed. This is achieved by the addition of one or more working electrodes in the incubation and detection chamber (C1 or C2). The electrodes can be plain, or modified, as described above for the single electrochemical detection method.

[0491] Electrochemiluminescence in a combined optical and electrochemical readout method. The optical signal may be produced by luminescence of a compound, such as tri-propyl amine (TPA) generated as an oxidation product of an electroactive product, such as ruthenium bipyridine,[Ru (py)3]2+.

[0492] A number of different programmable nuclease proteins may be multiplexed by: (1) separate fluidic paths (parallelization of channels), mixed with the same sample, for each of the proteins, or (2) switching to digital (two-phase) microfluidics, where each individual droplet contains a separate reaction mix. The droplets could be generated from single or double emulsions of water and oil. The emulsions are compatible with programmable nuclease reaction, and optically inert.

[0493] FIG. 5 shows an example fluidic device for coupled invertase/Cas reactions with colorimetric or electrochemical/glucometer readout. This diagram illustrates a fluidic device for miniaturizing a Cas reaction coupled with the enzyme invertase. Surface modification and readout processes are depicted in exploded view schemes at the bottom including (a) optical readout using DNS, or other compound and (b) electrochemical readout (electrochemical analyzer or glucometer). Described herein is the coupling of the Cas reaction with the enzyme invertase (EC 3.2.1.26), or sucrase or β-fructofuranosidase. This enzyme catalyzes the breakdown of sucrose to fructose and glucose.

[0494] The following methods may be used to couple the readout of the Cas reaction to invertase activity:

[0495] Colorimetry using a camera, standalone, or an integrated mobile phone optical sensor. The amount of fructose and glucose is linked to a colorimetric reaction. Two examples are: (a) 3,5-Dinitrosalicylic acid (DNS), and (b) formazan dye thiazolyl blue. The color change can be monitored using a CCD camera, or the image sensor of a mobile phone. For this method, we use a variation of the fluidic device described in FIG. 5. The modification is the use of a camera, instead of a fluorimeter above C3.

[0496] Amperometry using a conventional glucometer, or an electrochemical analyzer. A variation of the fluidic device described in FIG. 3 may be used, for example, the addition of one more incubation chamber C3. An additional step is added to the reaction scheme, which takes place in chamber C2. The top of the chamber surface is coated with single stranded nucleic acid that is conjugated to the enzyme invertase (Inv). The target-activated programmable nuclease complex cleaves the invertase enzyme from the oligo (ssRNA, ssDNA or ssRNA/DNA hybrid molecule), in C2, and invertase is then available to catalyze the hydrolysis of sucrose injected by pump P4, and controlled by valve V4. The mixture is mixed in serpentine mixer S3, and at chamber C3, the glucose produced may be detected colorimetrically, as previously described, electrochemically. The enzyme glucose oxidase is dried on the surface on C3, and catalyzes the oxidation of glucose to hydrogen peroxide and D-glucono-δ-lactone.

[0497] A number of different devices are compatible with detection of target nucleic acids using the methods and compositions disclosed herein. In some embodiments, the device is any of the microfluidic devices disclosed herein. In other embodiments, the device is a lateral flow test strip connected to a reaction chamber. In further embodiments, the lateral flow strip may be connected to a sample preparation device.

[0498] In some embodiments, the fluidic device may be a pneumatic device. The pneumatic device may comprise one or more sample chambers connected to one or more detection chambers by one or more pneumatic valves. Optionally, the pneumatic device may further comprise one or more amplification chamber between the one or more sample chambers and the one or more detection chambers. The one or more amplification chambers may be connected to the one or more sample chambers and the one or more detection chambers by one or more pneumatic valves. A pneumatic valve may be made from PDMS, or any other suitable material. A pneumatic valve may comprise a channel perpendicular to a microfluidic channel connecting the chambers and allowing fluid to pass between chambers when the valve is open. In some embodiments, the channel deflects downward upon application of air pressure through the channel perpendicular to the microfluidic channel.

[0499] In some embodiments, the fluidic device may be a sliding valve device. The sliding valve device may comprise a sliding layer with one or more channels and a fixed layer with one or more sample chambers and one or more detection chambers. Optionally, the fixed layer may further comprise one or more amplification chambers. In some embodiments, the sliding layer is the upper layer and the fixed layer is the lower layer. In other embodiments, the sliding layer is the lower layer and the fixed layer is the upper layer. In some embodiments, the upper layer is made of a plastic polymer comprising poly-methacrylate (PMMA), cyclic olefin polymer (COP), cyclic olefin copolymer (COC), polyethylene (PE), high-density polyethylene (HDPE), polypropylene (PP); a glass; or a silicon. In some embodiments, the lower layer is made of a plastic polymer comprising poly-methacrylate (PMMA), cyclic olefin polymer (COP), cyclic olefin copolymer (COC), polyethylene (PE), high-density polyethylene (HDPE), polypropylene (PP); a glass; or a silicon.The sliding valve device may further comprise one or more of a side channel with an opening aligned with an opening in the sample chamber, a side channel with an opening aligned with an opening in the amplification chamber, or a side channel with an opening aligned with the opening in the detection chamber. In some embodiments the side channels are connected to a mixing chamber to allow transfer of fluid between the chambers. In some embodiments, the sliding valve device comprises a pneumatic pump for mixing, aspirating, and dispensing fluid in the device.

[0500] Pneumatic Valve Device. A microfluidic device particularly well suited for carrying out the DETECTR reactions described herein is one comprising a pneumatic valve, also referred to as a “quake valve”. The pneumatic valve can be closed and opened by the flow of air from, for an example, an air manifold. The opening of the pneumatic valve can lead to a downward deflection of the channel comprising the pneumatic valve, which can subsequently deflect downwards and seal off a microfluidic channel beneath the channel comprising the pneumatic valve. This can lead to stoppage of fluid flow in the microfluidic channel. When the air manifold is turned off, the flow of air through the channel comprising the quake valve ceases and the microfluidic channel beneath the channel comprising the quake valve is “open”, and fluid can flow through. In some embodiments, the channel comprising the pneumatic valve may be above or below the microfluidic channel carrying the fluid of interest. In some embodiments, the channel comprising the pneumatic valve can be parallel or perpendicular to the microfluidic channel carrying the fluid of interest. Pneumatic valves can be made of a two hard thermoplastic layers sandwiching a soft silicone layer.

[0501] One example layout that is compatible with the compositions and methods disclosed herein is shown in FIG. 55 and FIG. 55. In some embodiments, the device comprises a sample chamber and a detection chamber, wherein the detection chamber is fluidically connected to the sample chamber by a pneumatic valve and wherein the detection chamber comprises any programmable nuclease of the present disclosure. Optionally, the device can also include an amplification chamber that is between the fluidic path from the sample chamber to the detection chamber, is connected to the sample chamber by a pneumatic valve, and is additionally connected to the detection chamber by a pneumatic valve. In some embodiments, the pneumatic valve is made of PDMS, or any other material for forming microfluidic valves. In some embodiments, the sample chamber has a port for inserting a sample. The sample can be inserted using a swab. The sample chamber can have a buffer for lysing the sample. The sample chamber can have a filter between the chamber and the fluidic channel to the amplification or detection chambers. The sample chamber may have an opening for insertion of a sample. A sample can be incubated in the sample chamber for from 30 seconds to 10 minutes. The air manifold may until this point be on, pushing air through the pneumatic valve and keeping the fluidic channel between the sample chamber and the amplification or detection chambers closed. At this stage, the air manifold can be turned off, such that no air is passing through the pneumatic valve, and allowing the microfluidic channel to open up and allow for fluid flow from the sample chamber to the next chamber (e.g., the amplification or detection chambers). In devices where there is an amplification chamber, the lysed sample flows from the sample chamber into the amplification chamber. Otherwise, the lysed sample flows from the sample chamber into the detection chamber. At this stage, the air manifold is turned back on, to push air through the pneumatic valve and seal the microfluidic channel. The amplification chamber holds various reagents for amplification and, optionally, reverse transcription of a target nucleic acid in the sample. These reagents may include forward and reverse primers, a deoxynucleotide triphosphate, a reverse transcriptase, a T7 promoter, a T7 polymerase, or any combination thereof. The sample is allowed to incubate in the amplification chamber for from 5 minutes to 40 minutes. The amplified and, optionally reverse transcribed, sample is moved into the detection chamber as described above: the air manifold is turned off, ceasing air flow through the pneumatic valve and opening the microfluidic channel. The detection chamber can include any programmable nuclease disclosed herein, a guide RNA with a portion reverse complementary to a portion of the target nucleic acid, and any reporter disclosed herein. In some embodiments, the detection chamber may comprise a plurality of guide RNAs. The plurality of guide RNAs may have the same sequence, or one or more of the plurality of guide RNAs may have different sequences. In some embodiments, the plurality of guide RNAs has a portion reverse complementary to a portion of a target nucleic acid different than a second RNA of the plurality of guide RNAs. The plurality of guide RNAs may comprise at least 5, at least 10, at least 15, at least 20, or at least 50 guide RNAs. Once the sample is moved into the detection chamber, the DETECTR reaction can be carried out for 1 minute to 20 minutes. Upon hybridization of the guide RNA to the target nucleic acid, the programmable nuclease is activated and begins to collaterally cleave the reporter, which as described elsewhere in this disclosure has a nucleic acid and one or more molecules that enable detection of cleavage. The detection chamber can interface with a device for reading out for the signal. For example, in the case of a colorimetric or fluorescence signal generated upon cleavage, the detection chamber may be coupled to a spectrophotometer or fluorescence reader. In the case where an electrochemical signal is generated, the detection chamber may have one to 10 metal leads connected to a readout device (e.g., a glucometer), as shown in FIG. 60. FIG. 59 shows a schematic of the top layer of a cartridge of a pneumatic valve device of the present disclosure, highlighting suitable dimensions. The schematic shows one cartridge that is 2 inches by 1.5 inches. FIG. 60 shows a schematic of a modified top layer of a cartridge of a pneumatic valve device of the present disclosure adapted for electrochemical dimension. In this schematic, three lines are shown in the detection chambers (4 chambers at the very right). These three lines represent wiring (or “metal leads”), which is co-molded, 3D-printed, or manually assembled in the disposable cartridge to form a three-electrode system. Electrodes are termed as working, counter, and reference. Electrodes can also be screen printed on the cartridges. Metals used can be carbon, gold, platinum, or silver. A major advantage of the pneumatic valve device is that the pneumatic valves connecting the various chambers of the device prevent backflow from chamber to chamber, which reduces contamination. Prevention of backflow and preventing sample contamination is especially important for the applications described herein. Sample contamination can result in false positives or can generally confound the limit of detection for a target nucleic acid. As another example, the pneumatic valves disclosed herein are particularly advantageous for devices and methods for multiplex detection. In multiplexed assays, where two or more target nucleic acids are assayed for, it is particularly important that backflow and contamination is avoided. Backflow between chambers in a multiplexed assay can lead to cross-contamination of different guide nucleic acids or different programmable nuclease and can result in false results. Thus, the pneumatic valve device, which is designed to minimize or entirely avoid backflow, is particularly superior, in comparison to other device layouts, for carrying out the detection methods disclosed herein.

[0502] FIG. 55 shows a quake valve pneumatic pump layout for a DETECTR assay. FIG. 55A shows a schematic of a pneumatic valve device. A pipette pump aspirates and dispenses samples. An air manifold is connected to a pneumatic pump to open and close the normally closed valve. The pneumatic device moves fluid from one position to the next. The pneumatic design has reduced channel cross talk compared to other device designs. FIG. 55B shows a schematic of a cartridge for use in the pneumatic valve device shown in FIG. 55A. The valve configuration is shown. The normally closed valves (one such valve is indicated by an arrow) comprise an elastomeric seal on top of the channel to isolate each chamber from the rest of the system when the chamber is not in use. The pneumatic pump uses air to open and close the valve as needed to move fluid to the necessary chambers within the cartridge. FIG. 56 shows a valve circuitry layout for the pneumatic valve device shown in FIG. 55A. A sample is placed in the sample well while all valves are closed, as shown at (i.). The sample is lysed in the sample well. The lysed sample is moved from the sample chamber to a second chamber by opening the first quake valve, as shown at (ii.), and aspirating the sample using the pipette pump. The sample is then moved to the first amplification chamber by closing the first quake valve and opening a second quake valve, as shown at (iii.) where it is mixed with the amplification mixture. After the sample is mixed with the amplification mixture, it is moved to a subsequent chamber by closing the second quake valve and opening a third quake valve, as shown at (iv). The sample is moved to the DETECTR chamber by closing the third quake valve and opening a fourth quake valve, as shown at (v). The sample can be moved through a different series of chambers by opening and closing a different series of quake valves, as shown at (vi). Actuation of individual valves in the desired chamber series prevents cross contamination between channels. In some embodiments the sliding valve device has a surface area of 5 cm by 5 cm, 5 by 6 cm, 6 by 7 cm, 7 by 8 cm, 8 by 9 cm, 9 by 10 cm, 10 by 11 cm, 11 by 12 cm, 6 by 9 cm, 7 by 10 cm, 8 by 11 cm, 9 by 12 cm, 10 by 13 cm, 11 by 14 cm, 12 by 11 cm, about 30 sq cm, about 35 sq cm, about 40 sq cm, about 45 sq cm, about 50 sq cm, about 55 sq cm, about 60 sq cm, about 65 sq cm, about 70 sq cm, about 75 sq cm, about 25 sq cm, about 20 sq cm, about 15 sq cm, about 10 sq cm, about 5 sq cm, from 1 to 100 sq cm, from 5 to 10 sq cm, from 10 to 15 sq cm, from 15 to 20 sq cm, from 20 to 25 sq cm, from 25 to 30 sq cm, from 30 to 35 sq cm, from 35 to 40 sq cm, from 40 to 45 sq cm, from 45 to 50 sq cm, from 5 to 90 sq cm, from 10 to 0 sq cm, from 15 to 5 sq cm, from 20 to 10 sq cm, or from 25 to 15 sq cm.

[0503] Sliding Valve Device. A microfluidic device particularly well suited for carrying out the DETECTR reactions described herein is a sliding valve device. The sliding valve device can have a sliding layer and a fixed layer. The sliding layer may be on top and the fixed layer may be on bottom. Alternatively, the sliding layer may be on bottom and the fixed layer may be on top. In some embodiments, the sliding valve has a channel. The channel can have an opening at one end that interacts with an opening in a chamber and the channel can also have an opening at the other end that interacts with an opening in a side channel. In some embodiments, the sliding layer has more than one opening. In some embodiments, the fixed layer comprises a sample chamber, an amplification chamber, and a detection chamber. The sample chamber, the amplification chamber, and the detection layer can all have an opening at the bottom of the chambers. For example, the sample chamber may have an opening for insertion of a sample. When the opening in a chamber is aligned with the opening in a channel, fluid can flow from the chamber into the channel. Further, when the opening in the channel is subsequently aligned with an opening in a side channel, fluid can flow from the channel into the side channel. The side channel can be further fluidically connected to a mixing chamber, or a port in which an instrument (e.g., a pipette pump) for mixing fluid is inserted. Alignment of openings can be enabled by physically moving or automatically actuating the sliding layer to slide along the length of the fixed layer. In some embodiment, the above described pneumatic valves can be added at any position to the sliding valve device in order to control the flow of fluid from one chamber into the next. The sliding valve device can also have multiple layers. For example, the sliding valve can have 2, 3, 4, 5, 6, 7, 8, 9, 10, or more layers.

[0504] FIG. 46 shows a layout for a DETECTR assay. Shown at top is a pneumatic pump, which interfaces with the cartridge. Shown at middle is a top down view of the cartridge showing a top layer with reservoirs. Shown at bottom is a sliding valve containing the sample and arrows pointing to the lysis chamber at left, following by amplification chambers to the right, and DETECT chambers further to the right. FIG. 57 shows a schematic of a sliding valve device. The offset pitch of the channels allows aspirating and dispensing into each well separately and helps to mitigate cross talk between the amplification chambers and corresponding chambers. FIG. 58 shows a diagram of sample movement through the sliding valve device shown in FIG. 57. In the initial closed position (i.), the sample is loaded into the sample well and lysed. The sliding valve is then actuated by the instrument, and samples are loaded into each of the channels using the pipette pump, which dispenses the appropriate volume into the channel (ii.). The sample is delivered to the amplification chambers by actuating the sliding valve and mixed with the pipette pump (iii.). Samples from the amplification chamber are aspirated into each channel (iv.) and then dispensed and mixed into each DETECTR chamber (v.) by actuating the sliding valve and pipette pump. In some embodiments the sliding valve device has a surface area of 5 cm by 8 cm, 5 by 6 cm, 6 by 7 cm, 7 by 8 cm, 8 by 9 cm, 9 by 10 cm, 10 by 11 cm, 11 by 12 cm, 6 by 9 cm, 7 by 10 cm, 8 by 11 cm, 9 by 12 cm, 10 by 13 cm, 11 by 14 cm, 12 by 11 cm, about 30 sq cm, about 35 sq cm, about 40 sq cm, about 45 sq cm, about 50 sq cm, about 55 sq cm, about 60 sq cm, about 65 sq cm, about 70 sq cm, about 75 sq cm, about 25 sq cm, about 20 sq cm, about 15 sq cm, about 10 sq cm, about 5 sq cm, from 1 to 100 sq cm, from 5 to 10 sq cm, from 10 to 15 sq cm, from 15 to 20 sq cm, from 20 to 25 sq cm, from 25 to 30 sq cm, from 30 to 35 sq cm, from 35 to 40 sq cm, from 40 to 45 sq cm, from 45 to 50 sq cm, from 5 to 90 sq cm, from 10 to 0 sq cm, from 15 to 5 sq cm, from 20 to 10 sq cm, or from 25 to 15 sq cm.

[0505] Lateral Flow Devices. In some embodiments, a device of the present disclosure comprises a chamber and a lateral flow strip. FIG. 32-FIG. 33 shows a particularly advantageous layout for the lateral flow strip and a corresponding suitable reporter. FIG. 32 shows a modified Cas reporter comprising a DNA linker to biotin-dT (shown as a pink hexagon) bound to a FAM molecule (shown as a green start). FIG. 33 shows the layout of Milenia HybridDetect strips with the modified Cas reporter. This particular layout improves the test result by generating higher signal in the case of a positive result, while also minimizing false positives. In this assay layout, the reporter comprises a biotin and a fluorophore attached at one of a nucleic acid. The nucleic acid can be conjugated directly to the biotin molecule and then the fluorophore or directly to the fluorophore and then to the biotin. Other affinity molecules, including those described herein can be used instead of biotin. Any of the fluorophores disclosed herein can also be used in the reporter. The reporter can be suspended in solution or immobilized on the surface of the Cas chamber. Alternatively, the reporter can be immobilized on beads, such as magnetic beads, in the reaction chamber where they are held in position by a magnet placed below the chamber. When the reporter is cleaved by an activated programmable nuclease, the cleaved biotin-fluorophore accumulates at the first line, which comprises a streptavidin (or another capture molecule). Gold nanoparticles, which are on the sample pad and flown onto the strip using a chase buffer, are coated with an anti-fluorophore antibody allowing binding and accumulation of the gold nanoparticle at the first line. The nanoparticles additionally accumulate at a second line which is coated with an antibody (e.g., anti-rabbit) against the antibody coated on the gold nanoparticles (e.g., rabbit, anti-FAM). In the case of a negative result, the reporter is not cleaved and does not flow on the lateral flow strip. Thus, the nanoparticles only bind and accumulate at the second line Multiplexing on the lateral flow strip can be performed by having two reporters (e.g., a biotin-FAM reporter and a biotin-DIG reporter). Anti-FAM and anti-DIG antibodies are coated onto the lateral flow strip at two different regions. Anti-biotin antibodies are coated on gold nanoparticles. Fluorophores are conjugated directly to the affinity molecules (e.g., biotin) by first generating a biotin-dNTP following from the nucleic acids of the reporter and then conjugating the fluorophore. In some embodiments, the lateral flow strip comprises multiple layers.

[0506] In some embodiments, the above lateral flow strip can be additionally interfaced with a sample preparation device, as shown in FIG. 7 and FIG. 8. FIG. 7 shows individual parts of sample preparation devices of the present disclosure. Part A of the figure shows a single chamber sample extraction device: (a) the insert holds the sample collection device and regulates the step between sample extraction and dispensing the sample into another reaction or detection device, (b) the single chamber contains extraction buffer. Part B of the figure shows filling the dispensing chamber with material that further purifies the nucleic acid as it is dispensed is an option: (a) the insert holds the sample collection device and regulates the “stages” of sample extraction and nucleic acid amplification. Each set of notches (red, blue and green) are offset 90° from the preceding set, (b) the reaction module contains multiple chambers separated by substrates that allow for independent reactions to occur. (e.g., i. a nucleic acid separation chamber, ii. a nucleic acid amplification chamber And iii. a DETECTR reaction chamber or dispensing chamber). Each chamber has notches (black) that prevent the insert from progressing into the next chamber without a deliberate 90° turn. The first two chambers may be separated by material that removes inhibitors between the extraction and amplification reactions. Part C shows options for the reaction/dispensing chamber: (a) a single dispensing chamber may release only extracted sample or extraction/amplification or extraction/amplification/DETECTR reactions, (b) a duel dispensing chamber may release extraction/multiplex amplification products, and (c) a quadruple dispensing chamber would allow for multiplexing amplification and single DETECTR or four single amplification reactions. FIG. 8 shows a sample work flow using a sample processing device. The sample collection device is attached to the insert portion of the sample processing device (A). The insert is placed into the device chamber and pressed until the first stop (lower tabs on top portion meet upper tabs on bottom portion) (B). This step allows the sample to come into contact with the nucleic acid extraction reagents. After the appropriate amount of time, the insert is turned 90° (C.) and depressed (D) to the next set of notches. These actions transfer the sample into the amplification chamber. The sample collection device is no longer in contact with the sample or amplification products. After the appropriate incubation, the insert is rotated 90° (E) and depressed (F) to the next set of notches. These actions release the sample into the DETECTR (green reaction). The insert is again turned 90° (G) and depressed (H) to dispense the reaction.

[0507] Resistance Channel Devices. In some embodiments, a device of the present disclosure may resistance channels, sample metering channels, valves for fluid flow or any combination thereof. FIG. 126A, FIG. 126B, FIG. 127A, FIG. 127B, FIG. 128A, FIG. 128B, FIG. 128C, FIG. 128D, FIG. 129A, FIG. 129B, FIG. 129C, and FIG. 129D show examples of said microfluidic cartridges for use in a DETECTR reaction. In some embodiments, a cartridge may comprise an amplification chamber, a valve fluidically connected to the amplification chamber, a detection reaction chamber fluidically connected to the valve, and a detection reagent reservoir fluidically connected to the detection chamber, as shown in FIG. 130A. In some embodiments, a device may further comprise a luer slip adapter, as shown in FIG. 131C. A leur slip adaptor may be used to adapt to a leur lock syringe for sample or reagent delivery into the device. One or more elements (e.g., chambers, channels, valves, or pumps) of a microfluidic device may be fluidically connected to one or more other elements of the microfluidic device. A first element may be fluidically connected to a second element such that fluid may flow between the first element and the second element. A first element may be fluidically connected to a second element through a third element such that fluid may flow from the first element to the second element by passing through the third element. For example, a detection reagent chamber may be fluidically connected to a detection chamber through a resistance channel, as shown in FIG. 130A.

[0508] A chamber of the device (e.g., the amplification chamber, the detection chamber, or the detection reagent reservoir) may be fluidically connected to one or more additional chambers by one or more channels. In some embodiments, a channel may be a resistance channel configured to regulate the flow of fluid between a first chamber and a second chamber. A resistance channel may form a non-linear path between the first chamber and the second chamber. It may include features to restrict or confound flow, such as bends, turns, fins, chevrons, herringbones or other microstructures. A resistance channel may have reduced backflow compared to a linear channel of comparable length and width. A resistance channel may function by requiring an increased pressure to pass fluid through the channel compared to a linear channel of comparable length and width. In some embodiments, a resistance channel may result in decreased cross-contamination between two chambers connected by the resistance channel as compared to the cross-contamination between two chambers connected by a linear channel of comparable length and width. A resistance channel may have an angular path, for example as illustrated FIG. 128A, FIG. 128B, FIG. 129C and FIG. 129D. An angular path may comprise one or more angles in the direction of flow of a fluid passing through the channel. In some embodiments, an angular path may comprise a right angle. In some embodiments, an angular path may comprise an angle of about 90°. In some embodiments, an angular path may comprise at least one angle between about 45° and about 135°. In some embodiments, an angular path may comprise at least one angle between about 80° and about 100°. In some embodiments, an angular path may comprise at least one angle between about 85° and about 95°. A resistance channel may have a circuitous or serpentine path, for example as illustrated in FIG. 128C, FIG. 128D, FIG. 129A, and FIG. 129B. A circuitous or serpentine path may comprise one or more bends in the direction of flow of a fluid passing through the channel. In some embodiments, a circuitous or serpentine path may comprise a bend of about 90°. In some embodiments, a circuitous or serpentine path may comprise at least one bend between about 45° and about 135°. In some embodiments, a circuitous or serpentine path may comprise at least one bend between about 80° and about 100°. In some embodiments, a circuitous or serpentine path may comprise at least one bend between about 85° and about 95°. In some embodiments, a resistance channel may be substantially contained within a plane (e.g., the resistance channel may be angular, circuitous, or serpentine in two-dimensions). A two-dimensional resistance channel may be positioned substantially within a single layer of a microfluidic device of the present disclosure. In some embodiments, a resistance channel may be a three-dimensional resistance channel (e.g., the resistance channel may be angular, circuitous, or serpentine in x, y, and z dimensions of a microfluidic device). In some embodiments, a sample input of a resistance channel may be in the same plane (e.g., at the same level in a z direction) as the resistance channel, a chamber connected to the resistance channel, or both. In some embodiments, a sample input of a resistance channel may be in a different plan (e.g., on a different level in a z direction) as the resistance channel, a chamber connected to the resistance channel, or both. Examples of resistance channels are shown in FIG. 133. In some embodiments a resistance channel may have a width of about 300 μm. In some embodiments a resistance channel may have a width of from about 10 μm to about 100 μm, from about 50 μm to about 100 μm, from about 100 μm to about 200 μm, from about 100 μm to about 300 μm, from about 100 μm to about 400 μm, from about 100 μm to about 500 μm, from about 200 μm to about 300 μm, from about 200 μm to about 400 μm, from about 200 μm to about 500 μm, from about 200 μm to about 600 μm, from about 200 μm to about 700 μm, from about 200 μm to about 800 μm, from about 200 μm to about 900 μm, or from about 200 μm to about 1000 μm.

[0509] In some embodiments, a channel may be a sample metering channel. A sample metering channel may form a path between a first chamber and a second chamber and have a channel volume configured to hold a set volume of a fluid to meter the volume of fluid transferred from the first chamber to the second chamber. A sample metering path may form a path between a first chamber and a second chamber and have a channel volume configured to allow to flow from the first channel to the second channel at a desired rate. Metering can also be affected by positive or negative pressure applied to an auxiliary chamber acting as a liquid reagent storage reservoir. This can also be done by storing air in a blister pack for low-cost applications. Examples of sample metering channels are shown in FIG. 133. In some embodiments, a sample input of a sample metering channel may be in the same plane (e.g., at the same level in a z direction) as the sample metering channel, a chamber connected to the sample metering channel, or both. In some embodiments, a sample input of a sample metering channel may be in a different plan (e.g., on a different level in a z direction) as the sample metering channel, a chamber connected to the sample metering channel, or both. The length, width, volume, or combination thereof of a sample metering channel may be designed to pass a desired volume of fluid from a first chamber to a second chamber. The length, width, volume, or combination thereof of a sample metering channel may be designed to pass fluid from a first chamber to a second chamber at a desired rate. In some embodiments, a sample metering channel may have a width of about 300 μm. In some embodiments a sample metering channel may have a width of from about 10 μm to about 100 μm, from about 50 μm to about 100 μm, from about 100 μm to about 200 μm, from about 100 μm to about 300 μm, from about 100 μm to about 400 μm, from about 100 μm to about 500 μm, from about 200 μm to about 300 μm, from about 200 μm to about 400 μm, from about 200 μm to about 500 μm, from about 200 μm to about 600 μm, from about 200 μm to about 700 μm, from about 200 μm to about 800 μm, from about 200 μm to about 900 μm, or from about 200 μm to about 1000 μm. In some embodiments, a first chamber may be connected to a second chamber by a channel comprising a resistance channel and a sample metering channel.

[0510] A schematic example of a resistance channel is shown in FIG. 133. The valve seat may have a reduced height of about 142 μm and the valve has a dead volume of about 2 μL. The valve may be positioned on a different plane than the sample metering channel to minimize the seat height and the dead volume and to improve sealing. The DETECTR sample metering inlet may be positioned on a different level than the sample metering channel so that the sample enters the channel at a different height to prevent amplified sample entry or backflow. The sample metering channel may have an increased height of about 784 μm to accommodate 5 μL of metered sample with a footprint of about 0.784 mm×0.75 mm×8.25 mm, as compared to a channel with a height of 142 μm and a footprint of about 0.142 mm×0.75 mm×46 mm. The DETECTR sample detection well inlet may be positioned on a different level than the mixing well so that the DETECTR sample enters the detection well at a different level to reduce the cross sectional area and reduce backflow.

[0511] A microfluidic device may comprise one or more reagent ports configured to receive a reagent into the device (e.g., into a chamber of the device). A reagent port may comprise an opening in the wall of a chamber. A reagent port may comprise an opening in the wall of a channel or the end of a channel. A reagent port configured to receive a sample may be a sample inlet port. A reagent (e.g., a buffer, a solution, or a sample) may be introduced into the microfluidic device through a reagent port. The reagent may be introduced manually by a user (e.g., a human user), or the reagent may be introduced automatically by a machine (e.g., by a detection manifold).

[0512] A variety of chamber shapes may be utilized in the cartridges of the present disclosure. A chamber may be circular, for example the amplification chambers, detection chambers, and detection reagent reservoirs shown in FIG. 128A and FIG. 128C. A chamber may be elongated, for example the amplification chambers and detection reagent reservoirs shown in FIG. 128B, FIG. 128D, FIG. 129A, FIG. 129B, FIG. 129C, and FIG. 129D.

[0513] A valve may be configured to prevent, regulate, or allow fluid flow from a first chamber to one or more additional chambers. In some embodiments, a valve may rotate from a first position to a second position to prevent, allow, or alter a fluid flow path. In some embodiments, a valve may slide from a first position to a second position to prevent, allow, or alter a fluid flow path. In some embodiments, a valve may open or close based on pressure applied to the valve. In some embodiments, a valve may be an elastomeric valve. The valve can be active (mechanical, non-mechanical, or externally actuated) or passive (mechanical or non-mechanical). A valve may be a push-pull/solenoid actuated valve. A valve may be controlled electronically. For example, a valve may be controlled using a solenoid. In some embodiments, a valve may be controlled manually. Other mechanisms of control may be: magnetic, electric, piezoelectric, thermal, bistable, electrochemical, phase change, rheological, pneumatic, check valving or capillarity. In some embodiment, a valve may be disposable. For example, a valve may be removed from a microfluidic device and replaced with a new valve to prevent contamination when reusing a microfluidic device. In some embodiments, a valve may be covered by a valve cap or elastomeric plug.

[0514] The cartridge may be configured to connect to a first pump to pump fluid from the amplification chamber to the detection chamber and to a second pump to pump fluid from the detection reagent reservoir to the detection chamber. A variety of pumps known in the art are functional to move fluid from a first chamber to a second chamber and may be used with a cartridge of the present disclosure. In some embodiments, a cartridge may be used with a peristaltic pump, a pneumatic pump, a hydraulic pump, or a syringe pump.

[0515] An example of a microfluidic cartridge is shown in FIG. 127A and FIG. 127B. As shown in FIG. 127A, the cartridge may contain an amplification chamber and sample inlet well capable of storing about 45 μL of aqueous reaction mix to which a user adds about 5 μL of sample. The amplification chamber may be sealed. A pump air inlet interfaces the cartridge to an external low-volume low-power pump for solution control. The on-board cartridge valve may be configured to contain amplification mixture during the heating step and during pressure build-up. The cartridge ma contain an amplification mix splitter to split the incoming amplification reaction mix and allows a pump to dispense about 5 μL directly to the detection chambers. Dual detection chambers can be vented with hydrophobic PTFE vent to allow solution entry, have a clear top for imaging and detection, and may be heated to 37° C. for 10 minutes during a reaction. In some embodiments, a detection chamber may be sized such that an amplified sample mixture fills the detection chamber when combined with the detection reagents from the detection reagent storage chamber. DETECTR reaction mix storage wells, also referred to as a detection reagent storage chambers, can store about 100 μL, of aqueous DETECTR mix on-board the cartridge. The pump air inlet interfaces the cartridge to an external low-volume low-power pump for solution control. As shown in FIG. 127B, the cartridge may contain a cartridge air supply valves, and entries sit above aqueous reagent to prevent overspill. Passive reagent fill stops form a torturous path and have hydrostatic head to passively prevent aqueous solution flow into cartridge after filling. The on-board elastomeric valve prevents forward flow under pressure build-up from the reaction mixture heated to 65° C. and is actuated by a low-cost, small-footprint linear actuator.

[0516] In some embodiments, a device may comprise a multi-layered, laminated cartridge patterned with laser embossing, and hardware with integrated electronics, optics and mechanics, as shown in FIG. 130B. A multi-layered device may be manufactured by two-dimensional lamination, as shown in FIG. 131B (left). In some embodiments, a device may be injection molded. An injection molded device may be laminated to seal the device, as shown in FIG. 131B (right). Injection molding may be used for high volume production of a microfluidic device of the present disclosure.

[0517] Detection Manifolds. A detection manifold may be used to perform and detect a DETECTR assay of the present disclosure in a device of the present disclosure. A detection manifold may also be referred to herein as a cartridge manifold or a heating manifold. A detection manifold may be configured to facilitate or detect a DETECTR reaction performed in a microfluidic device of the present disclosure. In some embodiments, a detection manifold may comprise one or more heating zones to heat one or more regions of a microfluidic device. In some embodiments, a detection manifold may comprise a first heating zone to heat a first region of a microfluidic device in which an amplification reaction is performed. For example, the first heater may heat the first region of the microfluidic device to about 60° C. In some embodiments, a detection manifold may comprise a second heating zone to heat a second region of a microfluidic device in which a detection reaction is performed. For example, the second heater may heat the second region of the microfluidic device to about 37° C. In some embodiments, a detection manifold may comprise a third heating zone to heat a third region of a microfluidic device in which a lysis reaction is performed. For example, the third heater may heat the third region of the microfluidic device to about 95° C. An example of a detection manifold comprising two insulated heating zones for use with a microfluidic cartridge is shown in FIG. 131A. In some embodiments, a detection manifold may comprise a heating zone configured to heat a lysis region of a microfluidic device of the presence disclosure. An example of a detection manifold comprising a lysis heating zone, an amplification heating zone, and a detection heating zone is shown in FIG. 132A and FIG. 132B. The detection manifold may be configured to be compatible with a microfluidic device comprising a lysis chamber, an amplification chamber, and a detection chamber.

[0518] In some embodiments, a detection manifold may comprise an illumination source configured to illuminate a detection chamber of a microfluidic device. The illumination source may be configured to emit a narrow spectrum illumination (e.g., an LED) or the illumination may be configured to emit a broad-spectrum illumination (e.g., an arc lamp). The detection manifold may further comprise one or more filters or gratings to filter for a desired illumination wavelength. In some embodiments, the illumination source may be configured to illuminate a detection chamber (e.g., a chamber comprising a DETECTR reaction) through a top surface of a microfluidic device. In some embodiments, the illumination source may be configured to illuminate a detection chamber through a side surface of a microfluidic device. In some embodiments, the illumination source may be configured to illuminate a detection chamber through a bottom surface of a microfluidic device. In some embodiments, the detection manifold may comprise a sensor for detecting a signal produced by a DETECTR reaction. The signal may be a fluorescent signal. For example, the detection manifold may comprise a camera (e.g., charge-coupled device (CCD), complementary metal-oxide-semiconductor (CMOS)) or a photodiode. A schematic example of a detection manifold is shown in FIG. 136A and FIG. 136B. An example of a detection illuminated in a detection manifold is shown in FIG. 137A.

[0519] A detection manifold may comprise electronics configured to control one or more of a temperature, a pump, a valve, an illumination source, or a sensor. In some embodiments, the electronics may be controlled autonomously using a program. For example, the electronics may be autonomously controlled to implement a workflow of the present disclosure (e.g., the workflow provided in FIG. 134). A schematic example of an electronic layout is provided in FIG. 135. The electronics may control one or more heaters using one or more of a power control, a temperature feedback, or a PID loop. One or more of a pump, a valve (e.g., a solenoid-controlled valve), or an LED (e.g., a blue LED) may be controlled by one or more of a power converter (e.g., a 3V, 12V, or 9V power converter) or a power relay board. A logic board may be used to control one or more elements of the detection manifold. A detection manifold may comprise one or more indicator lights to indicate a status of one or more elements (e.g., an LED, a heater, a pump, or a valve). The devices described in this section may be combined with any other features disclosed herein (e.g., pneumatic valves, components that operate via use of sliding valves, or any other general feature of devices disclosed herein).

[0520] General Features of Devices. In some embodiments, a device of the present disclosure can hold 2 or more amplification chambers. In some embodiments, a device of the present disclosure can hold 10 or more detection chambers. In some embodiments, a device of the present disclosure comprises a single chamber in which sample lysis, target nucleic acid amplification, reverse transcription, and detection are all carried out. In some cases, different buffers are present in the different chambers. In some embodiments, all the chambers of a device of the present disclosure have the same buffer. In some embodiments, the sample chamber comprises the lysis buffer and all of the materials in the amplification and detection chambers are lyophilized or vitrified. In some embodiments, the sample chamber includes any buffer for lysing a sample disclosed herein. The amplification chamber can include any buffer disclosed herein compatible with amplification and/or reverse transcription of target nucleic acids. The detection chamber can include any DETECTR or CRISPR buffer (e.g., an MBuffer) disclosed herein or otherwise capable of allowing DETECTR reactions to be carried out. In this case, once sample lysing has occurred, volume is moved from the sample chamber to the other chambers in an amount enough to rehydrate the materials in the other chambers. In some embodiments, the device further comprises a pipette pump at one end for aspirating, mixing, and dispensing liquids. In some embodiments, an automated instrument is used to control aspirating, mixing, and dispensing liquids. In some embodiments, no other instrument is needed for the fluids in the device to move from chamber to chamber or for sample mixing to occur. A device of the present disclosure may be made of any suitable thermoplastic, such as COC, polymer COP, teflon, or another thermoplastic material. Alternatively, the device may be made of glass. In some embodiments, the detection chamber may include beads, such as nanoparticles (e.g., a gold nanoparticle). In some embodiments, the reporters are immobilized on the beads. In some embodiments, after cleavage from the bead, the liberated reporters flow into a secondary detection chamber, where detection of a generated signal occurs by any one of the instruments disclosed herein. In some embodiments, the detection chamber is shallow, but has a large surface area that is optimized for optical detection. A device of the present disclosure may also be coupled to a thermoregulator. For example, the device may be on top of or adjacent to a planar heater that can heat the device up to high temperatures. Alternatively, a metal rod conducting heat is inserted inside the device and presses upon a soft polymer. The heat is transferred to the sample by dissipating through the polymer and into the sample. This allows for sample heating with direct contact between the metal rod and the sample. In some embodiments, in addition to or in place of a buffer for lysing a sample, the sample chamber may include an ultrasonicator for sample lysis. A swab carrying the sample may be inserted directly into the sample chamber. Commonly, a buccal swab may be used, which can carry blood, urine, or a saliva sample. A filter may be included in any of the chambers in the devices disclosed herein to filter the sample prior to carrying it to the next step of the method. Any of the devices disclosed herein can be couple to an additional sample preparation module for further manipulation of the sample before the various steps of the DETECTR reaction. In some embodiments the reporter can be in solution in the detection chamber. In other embodiments, the reporter can be immobilized directly on the surface of the detection chamber. The surface can be the top or the bottom of the chamber. In still other embodiments, the reporter can be immobilized to the surface of a bead. In the case of a bead, after cleavage, the detectable signal may be washed into a subsequent chamber while the bead remains trapped—thus allowing for separation of the detectable signal from the bead. Alternatively, cleavage of the reporter off of the surface of the bead is enough to generate a strong enough detectable signal to be measured. By sequestering or immobilizing the above described reporters, the stability of the reporters in the devices disclosed herein carrying out DETECTR reactions may be improved. Any of the above devices can be compatible for colorimetric, fluorescence, amperometric, potentiometric, or another electrochemical signal. In some embodiments, the colorimetric, fluorescence, amperometric, potentiometric, or another electrochemical sign may be detected using a measurement device connected to the detection chamber (e.g., a fluorescence measurement device, a spectrophotometer, or an oscilloscope).

[0521] In some embodiments, signals themselves can be amplified, for example via use of an enzyme such as horse radish peroxidase (HRP). In some embodiments, biotin and avidin reactions, which bind at a 4:1 ratio can be used to immobilize multiple enzymes or secondary signal molecules (e.g., 4 enzymes of secondary signal molecules, each on a biotin) to a single protein (e.g., avidin). In some embodiments, an electrochemical signal may be produced by an electrochemical molecule (e.g., biotin, ferrocene, digoxigenin, or invertase). In some embodiments, the above devices could be couple with an additional concentration step. For example, silica membranes may be used to capture nucleic acids off a column and directly apply the Cas reaction mixture on top of said filter. In some embodiments, the sample chamber of any one of the devices disclosed herein can hold from 20 ul to 1000 ul of volume. In some embodiments, the sample chamber holds from 20 to 500, from 40 to 400, from 30 to 300, from 20 to 200 or from 10 to 100 ul of volume. In preferred embodiments, the sample chamber holds 200 ul of volume. The amplification and detection chambers can hold a lower volume than the sample chamber. For example, the amplification and detection chambers may hold from 1 to 50, 10 to 40, 20 to 30, 10 to 40, 5 to 35, 40 to 50, or 1 to 30 ul of volume. Preferably, the amplification and detection chambers may hold about 200 ul of volume. In some embodiments, an exonuclease is present in the amplification chamber or may be added to the amplification chamber. The exonuclease can clean up single stranded nucleic acids that are not the target. In some embodiments, primers for the target nucleic acid can be phosophorothioated in order to prevent degradation of the target nucleic acid in the presence of the exonuclease. In some embodiments, any of the devices disclosed herein can have a pH balancing well for balancing the pH of a sample. In some embodiments, in each of the above devices, the reporter is present in at least four-fold excess of total nucleic acids (target nucleic acids +non-target nucleic acids). Preferably the reporter is present in at least 10-fold excess of total nucleic acids. In some embodiments, the reporter is present in at least 4-fold, at least 5-fold at least 6-fold, at least 7-fold, at least 8-fold, at least 9-fold, at least 10-fold, at least 15-fold, at least 20-fold, at least 50-fold, at least 100-fold, from 1.5 to 100-fold, from 4 to 80-fold, from 4 to 10-fold, from 5 to 20-fold or from 4 to 15-fold excess of total nucleic acids. In some embodiments, any of the devices disclosed herein can carry out a DETECTR reaction with a limit of detection of at least 0.1 aM, at least 0.1 nM, at least 1 nM or from 0.1 aM to 1 nM. In some embodiments, the devices disclosed herein can carry out a DETECTR reaction with a positive predictive value of at least 75%, at least 80%, at least 85%, at least 90%, at least 92%, at least 95%, at least 97%, at least 99%, or 100%. In some embodiments, the devices disclosed herein can carry out a DETECTR reaction with a negative predictive value of at least 75%, at least 80%, at least 85%, at least 90%, at least 92%, at least 95%, at least 97%, at least 99%, or 100%. In some embodiments, spatial multiplexing in the above devices is carried out by having at least one, more than one, or every detection chamber in the device comprise a unique guide nucleic acid.

[0522] Workflows. A DETECTR reaction may be performed in a microfluidic device using many different workflows. In some embodiments, a workflow for measuring a buccal swab sample may comprise swabbing a cheek, adding the swab to a lysis solution, incubating the swab to lyse the sample, combining the lysed sample with reagents for amplification of a target nucleic acid, combining the amplified sample with DETCTR reagents, and incubating the sample to detect the target nucleic acid. In some embodiments, one or more of lysis, amplification, and detection may be performed in a microfluidic device (e.g., a microfluidic cartridge illustrated in FIG. 126A-B, FIG. 127A-B, FIG. 128A-D, FIG. 129A-D, FIG. 130A, FIG. 133, FIG. 150, FIG. 151, or FIG. 157-FIG. 167. In some embodiments, the workflow may comprise measuring a detectable signal indicative of the presence or absence of a target nucleic acid using a detection manifold (e.g., a detection manifold illustrated in FIG. 136A-B, FIG. 137B, FIG. 137C, FIG. 138A-B, FIG. 156, FIG. 168, or FIG. 172).

[0523] An example of a workflow for detecting a target nucleic acid is provided in FIG. 134. The cartridge may be loaded with a sample and reaction solutions. The amplification chamber may be heated to 60° C. and the sample may incubated in the amplification chamber for 30 minutes. The amplified sample may be pumped to the DETECTR reaction chambers, and the DETECTR reagents may be pumped to the DETECTR reaction chambers. The DETECTR reaction chambers may be heated to 37° C. and the sample may be incubated for 30 minutes. The fluorescence in the DETECTR reaction chambers may be measured in real time to produce a quantitative result.

[0524] An example of a workflow for detecting a target nucleic acid (e.g., a viral target nucleic acid) may comprise swabbing a cheek of a subject. The swab may be added to about 200 μL of a low-pH solution. In some embodiments, the swab may displace the solution so that the total volume is about 220 μL. The swab may be incubated in the low-pH solution for about a minute. In some embodiments, cells or viral capsids present on the swab may be lysed in the low-pH solution. A portion of the sample (5 μL) may be combined with about 45 μL of an amplification solution in an amplification chamber. The total volume within the chamber may be about 50 μL. The sample may be incubated in the amplification chamber for up to about 30 minutes at a temperature of from about 50° C. to about 65° C. to amplify the target nucleic acid the sample. In some embodiments, two aliquots of about 5 μL each of the amplified sample may be directed to two detection chambers where they are combined with about 95 μL each of a DETECTR reaction mix. The amplified sample may be incubated with the DETECTR reaction mix for up to about 10 minutes at about 37° C. in each of two detection chambers to detect the presence or absence of the target nucleic acid.

[0525] In some embodiments, a workflow for a DETECTR reaction performed in a microfluidic device may be implemented by a user. A user may collect a sample from a subject (e.g., a buccal swab or a nasal swab), place the sample in a lysis buffer, add the lysed sample to a microfluidic cartridge of the present disclosure, and insert the cartridge in a detection manifold of the present disclosure. In some embodiments, a user may add an unlysed sample to the microfluidic cartridge. In some embodiments, a workflow for a DETECTR reaction may be implemented in a microfluidic cartridge of the present disclosure. A microfluidic cartridge may comprise one or more reagents in one or more chambers to facilitate one or more of lysis, amplification, or detection of a target nucleic acid in a sample. In some embodiments, a workflow for a DETECTR reaction performed in a microfluidic device may be facilitated by a detection manifold. A detection manifold may provide one or more of heating control for an amplification reaction, a detection reaction, or both, solution movement control (e.g., pump control or valve control), illumination, or detection.

[0526] In some embodiments, a workflow for a DETECTR performed a microfluidic cartridge and facilitated by a user and a detection manifold may comprise steps of: 1) user loads sample into cartridge comprising one or more reagents, 2) user inserts cartridge into a detection manifold and presses a start button, 3) manifold energizes a solenoid to close a valve between a amplification chamber and a detection chamber, 4) manifold indicator LED turns on, 5) manifold turns on first heater to heat a first heating zone to 60° C. and second heater to heat a second heating zone to 37° C., 5) incubate sample in amplification chamber for 30 minutes in first heating zone to amplify sample, 6) manifold turns off first heater, 7) manifold de-energizes solenoid to open valve, 8) manifold turns on a first pump for 15 seconds to pump the amplified sample to the detection chamber, 9) manifold turns off first pump, 10) manifold turns on a second pump for 15 seconds to pump detection reagents from a detection reagent storage chamber to the detection chamber, 11) manifold turns off second pump, 12) incubate amplified sample and detection reagents in detection chamber for 30 minutes in second heating zone to perform detection reaction, 13) manifold indicator LED turns off, 14) manifold turns on illumination source and measures detectable signal produced by detection reaction.

[0527] An example of a workflow that may be performed in a microfluidic device, for example the microfluidic device shown in FIG. 159, and facilitated by a detection manifold, for example the detection manifold shown in FIG. 168, may comprise the following steps: 1) Add a swab containing a sample to chamber C2 while valves V1-V18 are closed, heater 1 is off, and heater 2 is off; 2) snap off the end of the swab and close the lid of the device; 3) suspend swab in lysis solution by opening valve V1 to facilitate flow of lysis solution from chamber C1 to chamber C2; 4) meter about 20 μL of lysate from chamber C2 to each of chambers C7-C10 by opening valve V2 and mix with contents from chambers C3-C6 by opening valves V3-V6; 5) close all valves and turn on heater 1 to incubate the samples in chambers C7-C10 at 60° C. to amplify; 6) turn off heater 1, meter about 10 μL of amplicon into each of chambers C19-C26 from chambers C7-C10 (2×10 μL from each chamber), and combine with the contents from each of chambers C11-C18 by opening valves V7-V18; 7) close all valves and turn on heater 2 to incubate the sample in chambers C19-C26 at 37° C. to perform CRISPR detection reaction; 8) detect the samples in chambers C19-C26 by illuminating at 470 nm and detecting at 520 nm during the incubation of step 7.

[0528] In some embodiments, a workflow performed in microfluidic device may comprise partitioning a sample into two or more chambers. A device may be configured to partition a sample into a plurality of portions. A device may be configured to transfer two portions of a partitioned sample into separate fluidic channels or chambers. A device may be configured to transfer a plurality of portions of a sample into a plurality of different fluidic channels or chambers. A device may be configured to perform reactions on individual portions of a partitioned sample. A device may be configured to partition a sample into 2 portions. A device may be configured to partition a sample into 3 portions. A device may be configured to partition a sample into 4 portions. A device may be configured to partition a sample into 5 portions. A device may be configured to partition a sample into 6 portions. A device may be configured to partition a sample into 7 portions. A device may be configured to partition a sample into 8 portions. A device may be configured to partition a sample into 9 portions. A device may be configured to partition a sample into 10 portions. A device may be configured to partition a sample into 12 portions. A device may be configured to partition a sample into 15 portions. A device may be configured to divide a sample into at least 20 portions. A device may be configured to partition a sample into at least 50 portions. A device may be configured to partition a sample into 100 portions. A device may be configured to partition a sample into 500 portions.

[0529] A device may be configured to perform a first reaction on a first portion of a sample and a second reaction on a second portion of a partitioned sample. A device may be configured to perform a different reaction on each portion of a partitioned sample. A device may be configured to perform sequential reactions on a sample or a portion of a sample. A device may be configured to perform a first reaction in a first chamber and a second reaction in a second chamber on a sample or portion of a sample.

[0530] A device may be configured to mix a sample with reagents. In some cases, a device mixes a sample with reagents by flowing the sample and reagents back and forth between a plurality of compartments. In some cases, a device mixes a sample with reagents by cascading the sample and reagents into a single compartment (e.g., by flowing both the sample and reagents into the compartment from above). In some cases, the mixing method performed by the device minimizes the formation of bubbles. In some cases, the mixing method performed by the device minimizes the sample loss or damage (e.g., protein precipitation).

[0531] A device may be configured to perform a plurality of reactions on a plurality of portions of a sample. In some cases, a device comprises a plurality of chambers each comprising reagents. In some cases, two chambers from among the plurality of reagent comprising chambers comprise different reagents. In some cases, a first portion and a second portion of a sample may be subjected to different reactions. In some cases, a first portion and a second portion of a sample may be subjected to the same reactions in the presence of different reporter molecules. In some cases, a first portion and a second portion of a sample may be subjected to the same detection method. In some cases, a first portion and a second portion of a sample may be subjected to different detection methods. In some cases, a plurality of portions of a sample may be detected separately (e.g., by a diode array that excites and detects fluorescence from each portion of a sample individually). In some cases, a plurality of portions of a sample may be detected simultaneously. For example, a device may partition a single sample into 4 portions, perform different amplification reactions on each portion, partition the products of each amplification reaction into two portions, perform different DETECTR reactions on each portion, and individually measure the progress of each DETECTR reaction.

[0532] A device may be configured to partition a small quantity of sample for a large number of different reactions or sequences of reactions. In some cases, a device may partition less than 1 ml of sample for a plurality of different reactions or sequences of reactions. In some cases, a device may partition less than 800 μl of sample for a plurality of different reactions or sequences of reactions. In some cases, a device may partition less than 600 μl of sample for a plurality of different reactions or sequences of reactions. In some cases, a device may partition less than 400 μl of sample for a plurality of different reactions or sequences of reactions. In some cases, a device may partition less than 200 μl of sample for a plurality of different reactions or sequences of reactions. In some cases, a device may partition less than 100 μl of sample for a plurality of different reactions or sequences of reactions. In some cases, a device may partition less than 50 μl of sample for a plurality of different reactions or sequences of reactions. In some cases, a device may partition less than 1 mg of sample for a plurality of different reactions or sequences of reactions. In some cases, a device may partition less than 800 μg of sample for a plurality of different reactions or sequences of reactions. In some cases, a device may partition less than 600 μg of sample for a plurality of different reactions or sequences of reactions. In some cases, a device may partition less than 400 μg of sample for a plurality of different reactions or sequences of reactions. In some cases, a device may partition less than 200 μg of sample for a plurality of different reactions or sequences of reactions. In some cases, a device may partition less than 100 μg of sample for a plurality of different reactions or sequences of reactions. In some cases, a device may partition less than 50 μg of sample for a plurality of different reactions or sequences of reactions. In some cases, a device may partition less than 20 μg of sample for a plurality of different reactions or sequences of reactions. In some cases, a device may partition less than 10 μg of sample for a plurality of different reactions or sequences of reactions. In some cases, a device may partition less than 1 μg of sample for a plurality of different reactions or sequences of reactions. In some cases, a device may partition less than 800 ng of sample for a plurality of different reactions or sequences of reactions. In some cases, a device may partition less than 600 ng of sample for a plurality of different reactions or sequences of reactions. In some cases, a device may partition less than 400 ng of sample for a plurality of different reactions or sequences of reactions. In some cases, a device may partition less than 200 ng of sample for a plurality of different reactions or sequences of reactions. In some cases, a device may partition less than 100 ng of sample for a plurality of different reactions or sequences of reactions. In some cases, a device may partition less than 50 ng of sample for a plurality of different reactions or sequences of reactions. In some cases, the sample may comprise nucleic acid. In some cases, the sample may comprise cells. In some cases, the sample may comprise proteins. In some cases, the plurality of different reactions or sequences of reactions may comprise 2 or more different reactions or sequences of reactions. In some cases, the plurality of different reactions or sequences of reactions may comprise 3 or more different reactions or sequences of reactions. In some cases, the plurality of different reactions or sequences of reactions may comprise 4 or more different reactions or sequences of reactions. In some cases, the plurality of different reactions or sequences of reactions may comprise 5 or more different reactions or sequences of reactions. In some cases, the plurality of different reactions or sequences of reactions may comprise 10 or more different reactions or sequences of reactions. In some cases, the plurality of different reactions or sequences of reactions may comprise 20 or more different reactions or sequences of reactions. In some cases, the plurality of different reactions or sequences of reactions may comprise 50 or more different reactions or sequences of reactions. In some cases, the plurality of different reactions or sequences of reactions may comprise 100 or more different reactions or sequences of reactions. In some cases, the plurality of different reactions or sequences of reactions may comprise 500 or more different reactions or sequences of reactions. In some cases, the plurality of different reactions or sequences of reactions may comprise 1000 or more different reactions or sequences of reactions. In some cases, a first reaction or sequence of reactions and a second reaction or sequence of reactions detect two different nucleic acid sequences. In some cases, each reaction or sequence of reactions from among a plurality of different reactions or sequences of reactions detects a different nucleic acid sequence. For example, a device may be configured to perform 40 different sequences of reactions designed to detect 40 different nucleic acid sequences from a single sample comprising 200 ng DNA (e.g., 200 ng DNA from a buccal swab). In such a case, each of the 40 different nucleic acid sequences could be used to determine the presence of a particular virus in the sample.

[0533] In some cases, a device is configured to automate a step. In some cases, a device automates a sample partitioning step. In some cases, a device automates a reaction step (e.g., by mixing a sample with reagents and heating to a temperature for a defined length of time). In some cases, the device automates every step following sample input. In some cases, a device may automate a plurality of reactions on a single input sample. In some cases, a device may automate, detect, and provide results for a plurality of reactions on a single input sample. In some cases, a device may automate, detect, and provide results for a plurality of reactions on a single sample in less than 2 hours. For example, a device may automate 100 separate amplification and DETECTR reactions on a sample comprising 400 ng DNA, detect and then provide the results of the reactions in less than 2 hours. In some cases, a device may automate, detect, and provide results for a plurality of reactions on a single sample in less than 1 hour. In some cases, a device may automate, detect, and provide results for a plurality of reactions on a single sample in less than 40 minutes. In some cases, a device may automate, detect, and provide results for a plurality of reactions on a single sample in less than 20 minutes. In some cases, a device may automate, detect, and provide results for a plurality of reactions on a single sample in less than 10 minutes. In some cases, a device may automate, detect, and provide results for a plurality of reactions on a single sample in less than 5 minutes. In some cases, a device may automate, detect, and provide results for a plurality of reactions on a single sample in less than 2 minutes.

[0534] Microfluidic devices and detection manifolds for detection of viral infections. A microfluidic device of the present disclosure (e.g., a microfluidic device illustrated in FIG. 126A-B, FIG. 127A-B, FIG. 128A-D, FIG. 129A-D, FIG. 130A, FIG. 133, FIG. 151, FIG. 154, or FIG. 157-FIG. 167) may be used to detect the presence or absence of an influenza virus (e.g., an influenza A virus or an influenza B virus) in a biological sample. Detection of the influenza virus may be facilitated by a detection manifold (e.g., a detection manifold illustrated in FIG. 136A-B, FIG. 137B, FIG. 137C, FIG. 138A-B, FIG. 156, FIG. 168, or FIG. 172). A biological sample may be collected from a subject, for example via a nasal swab or a buccal swab, and introduced into an amplification chamber of the microfluidic device. The chamber may comprise lysis buffer, amplification reagents, or both. In some embodiments, the biological sample may be contacted with a lysis buffer prior to introduction into the amplification chamber. In some embodiments, the amplification reagents may be introduced into the amplification chamber from an amplification reagent storage chamber. Introduction of the amplification reagents may be controlled by actuating a pump, a valve, or both via the detection manifold. The amplification reagents may comprise primers to amplify a target nucleic acid present in the influenza viral genome. If the target nucleic acid is present in the sample, the target nucleic acid may be amplified (e.g., by TMA, HDA, cHDA, SDA, LAMP, EXPAR, RCA, LCR, SMART, SPIA, MDA, NASBA, HIP, NEAR, or IMDA). The first chamber may be heated by the detection manifold. The amplified sample may be introduced into a detection chamber by actuating a pump, a valve, or both via the detection manifold. The amplified sample may pass through a sample metering channel. Detection reagents may be introduced into the detection channel from a detection reagent storage chamber by actuating a pump, a valve, or both via the detection manifold. The detection reagents may pass through a sample metering channel, a resistance channel, or both. The detection reagents may comprise a programmable nuclease, a guide nucleic acid directed to the target nucleic acid, and a labeled detector nucleic acid. A detection reaction may be performed in the detection channel by heating the detection channel via the detection manifold. The presence or absence of the target nucleic acid associated with the influenza virus may be detected in the detection channel using the detection manifold. The presence or absence of the influenza virus may be determined by measuring a detectable signal produced by cleavage of the detector nucleic acid by the programmable nuclease upon binding to the target nucleic acid.

[0535] A microfluidic device of the present disclosure (e.g., a microfluidic device illustrated in FIG. 126A-B, FIG. 127A-B, FIG. 128A-D, FIG. 129A-D, FIG. 130A, FIG. 133, FIG. 151, FIG. 154, or FIG. 157-FIG. 167) may be used to detect the presence or absence of a coronavirus (e.g., a SARS-CoV-2 virus, a SARS-CoV virus, a MERS-CoV virus, a combination thereof, or a combination of any coronavirus strain and one or more other viruses or bacteria) in a biological sample. Detection of the coronavirus may be facilitated by a detection manifold (e.g., a detection manifold illustrated in FIG. 136A-B, FIG. 137B, FIG. 137C, FIG. 138A-B, FIG. 156, FIG. 168, or FIG. 172). A biological sample may be collected from a subject, for example via a nasal swab or a buccal swab, and introduced into an amplification chamber of the microfluidic device. The chamber may comprise lysis buffer, amplification reagents, or both. In some embodiments, the biological sample may be contacted with a lysis buffer prior to introduction into the amplification chamber. In some embodiments, the amplification reagents may be introduced into the amplification chamber from an amplification reagent storage chamber. Introduction of the amplification reagents may be controlled by actuating a pump, a valve, or both via the detection manifold. The amplification reagents may comprise primers to amplify a target nucleic acid present in the coronavirus genome. If the target nucleic acid is present in the sample, the target nucleic acid may be amplified (e.g., by TMA, HDA, cHDA, SDA, LAMP, EXPAR, RCA, LCR, SMART, SPIA, MDA, NASBA, HIP, NEAR, or IMDA). The first chamber may be heated by the detection manifold. The amplified sample may be introduced into a detection chamber by actuating a pump, a valve, or both via the detection manifold. The amplified sample may pass through a sample metering channel. Detection reagents may be introduced into the detection channel from a detection reagent storage chamber by actuating a pump, a valve, or both via the detection manifold. The detection reagents may pass through a sample metering channel, a resistance channel, or both. The detection reagents may comprise a programmable nuclease, a guide nucleic acid directed to the target nucleic acid, and a labeled detector nucleic acid. A detection reaction may be performed in the detection channel by heating the detection channel via the detection manifold. The presence or absence of the target nucleic acid associated with the coronavirus may be detected in the detection channel using the detection manifold. The presence or absence of the coronavirus may be determined by measuring a detectable signal produced by cleavage of the detector nucleic acid by the programmable nuclease upon binding to the target nucleic acid.

[0536] A microfluidic device of the present disclosure (e.g., a microfluidic device illustrated in FIG. 126A-B, FIG. 127A-B, FIG. 128A-D, FIG. 129A-D, FIG. 130A, FIG. 133, FIG. 151, FIG. 154, or FIG. 157-FIG. 167) may be used to detect the presence or absence of a respiratory syncytial virus in a biological sample. Detection of the respiratory syncytial virus may be facilitated by a detection manifold (e.g., a detection manifold illustrated in FIG. 136A-B, FIG. 137B, FIG. 137C, FIG. 138A-B, FIG. 156, FIG. 168, or FIG. 172). A biological sample may be collected from a subject, for example via a nasal swab or a buccal swab, and introduced into an amplification chamber of the microfluidic device. The chamber may comprise lysis buffer, amplification reagents, or both. In some embodiments, the biological sample may be contacted with a lysis buffer prior to introduction into the amplification chamber. In some embodiments, the amplification reagents may be introduced into the amplification chamber from an amplification reagent storage chamber. Introduction of the amplification reagents may be controlled by actuating a pump, a valve, or both via the detection manifold. The amplification reagents may comprise primers to amplify a target nucleic acid present in the respiratory syncytial viral genome. If the target nucleic acid is present in the sample, the target nucleic acid may be amplified (e.g., by TMA, HDA, cHDA, SDA, LAMP, EXPAR, RCA, LCR, SMART, SPIA, MDA, NASBA, HIP, NEAR, or IMDA). The first chamber may be heated by the detection manifold. The amplified sample may be introduced into a detection chamber by actuating a pump, a valve, or both via the detection manifold. The amplified sample may pass through a sample metering channel. Detection reagents may be introduced into the detection channel from a detection reagent storage chamber by actuating a pump, a valve, or both via the detection manifold. The detection reagents may pass through a sample metering channel, a resistance channel, or both. The detection reagents may comprise a programmable nuclease, a guide nucleic acid directed to the target nucleic acid, and a labeled detector nucleic acid. A detection reaction may be performed in the detection channel by heating the detection channel via the detection manifold. The presence or absence of the target nucleic acid associated with the respiratory syncytial virus may be detected in the detection channel using the detection manifold. The presence or absence of the respiratory syncytial virus may be determined by measuring a detectable signal produced by cleavage of the detector nucleic acid by the programmable nuclease upon binding to the target nucleic acid.

### Kit

[0537] Disclosed herein are kits fluidic devices, and systems for use to detect a target nucleic acid. In some embodiments, the kit comprises the reagents and the support medium. The reagent may be provided in a reagent chamber or on the support medium. Alternatively, the reagent may be placed into the reagent chamber or the support medium by the individual using the kit. Optionally, the kit further comprises a buffer and a dropper. The reagent chamber be a test well or container. The opening of the reagent chamber may be large enough to accommodate the support medium. The buffer may be provided in a dropper bottle for ease of dispensing. The dropper can be disposable and transfer a fixed volume. The dropper can be used to place a sample into the reagent chamber or on the support medium.

[0538] In some embodiments, a kit for detecting a target nucleic acid comprising a support medium; a guide nucleic acid targeting a target nucleic acid segment; a programmable nuclease capable of being activated when complexed with the guide nucleic acid and the target nucleic acid segment; and a single stranded detector nucleic acid comprising a detection moiety, wherein the detector nucleic acid is capable of being cleaved by the activated nuclease, thereby generating a first detectable signal.

[0539] In some embodiments, a kit for detecting a target nucleic acid comprising a PCR plate; a guide nucleic acid targeting a target nucleic acid segment; a programmable nuclease capable of being activated when complexed with the guide nucleic acid and the target nucleic acid segment;

[0540] and a single stranded detector nucleic acid comprising a detection moiety, wherein the detector nucleic acid is capable of being cleaved by the activated nuclease, thereby generating a first detectable signal. The wells of the PCR plate can be pre-aliquoted with the guide nucleic acid targeting a target nucleic acid segment, a programmable nuclease capable of being activated when complexed with the guide nucleic acid and the target sequence, and at least one population of a single stranded detector nucleic acid comprising a detection moiety. A user can thus add the biological sample of interest to a well of the pre-aliquoted PCR plate and measure for the detectable signal with a fluorescent light reader or a visible light reader.

[0541] In some instances, such kits may include a package, carrier, or container that is compartmentalized to receive one or more containers such as vials, tubes, and the like, each of the container(s) comprising one of the separate elements to be used in a method described herein. Suitable containers include, for example, test wells, bottles, vials, and test tubes. In one embodiment, the containers are formed from a variety of materials such as glass, plastic, or polymers.

[0542] The kit or systems described herein contain packaging materials. Examples of packaging materials include, but are not limited to, pouches, blister packs, bottles, tubes, bags, containers, bottles, and any packaging material suitable for intended mode of use.

[0543] A kit typically includes labels listing contents and/or instructions for use, and package inserts with instructions for use. A set of instructions will also typically be included. In one embodiment, a label is on or associated with the container. In some instances, a label is on a container when letters, numbers or other characters forming the label are attached, molded or etched into the container itself; a label is associated with a container when it is present within a receptacle or carrier that also holds the container, e.g., as a package insert. In one embodiment, a label is used to indicate that the contents are to be used for a specific therapeutic application. The label also indicates directions for use of the contents, such as in the methods described herein.

[0544] After packaging the formed product and wrapping or boxing to maintain a sterile barrier, the product may be terminally sterilized by heat sterilization, gas sterilization, gamma irradiation, or by electron beam sterilization. Alternatively, the product may be prepared and packaged by aseptic processing.

### Stability

[0545] Disclosed herein are stable compositions of the reagents and the programmable nuclease system for use in the methods as discussed above. The reagents and programmable nuclease system described herein may be stable in various storage conditions including refrigerated, ambient, and accelerated conditions. Disclosed herein are stable reagents. The stability may be measured for the reagents and programmable nuclease system themselves or the reagents and programmable nuclease system present on the support medium.

[0546] In some instances, stable as used herein refers to a reagents having about 5% w/w or less total impurities at the end of a given storage period. Stability may be assessed by HPLC or any other known testing method. The stable reagents may have about 10% w/w, about 5% w/w, about 4% w/w, about 3% w/w, about 2% w/w, about 1% w/w, or about 0.5% w/w total impurities at the end of a given storage period.

[0547] In some embodiments, stable as used herein refers to a reagents and programmable nuclease system having about 10% or less loss of detection activity at the end of a given storage period and at a given storage condition. Detection activity can be assessed by known positive sample using a known method. Alternatively or combination, detection activity can be assessed by the sensitivity, accuracy, or specificity. In some embodiments, the stable reagents has about 10%, about 9%, about 8%, about 7%, about 6%, about 5%, about 4%, about 3%, about 2%, about 1%, or about 0.5% loss of detection activity at the end of a given storage period.

[0548] In some embodiments, the stable composition has zero loss of detection activity at the end of a given storage period and at a given storage condition. The given storage condition may comprise humidity of equal to or less than 10%, 20%, 30%, 40%, 50%, 60%, 70%, 80%, 90%, or 100% relative humidity. The controlled storage environment may comprise humidity between 0% and 50% relative humidity, 0% and 40% relative humidity, 0% and 30% relative humidity, 0% and 20% relative humidity, or 0% and 10% relative humidity. The controlled storage environment may comprise temperatures of −100° C., −80° C., −20° C., 4° C., about 25° C. (room temperature), or 40° C. The controlled storage environment may comprise temperatures between −80° C. and 25° C., or −100° C. and 40° C. The controlled storage environment may protect the system or kit from light or from mechanical damage. The controlled storage environment may be sterile or aseptic or maintain the sterility of the light conduit. The controlled storage environment may be aseptic or sterile.

[0549] In some cases, reagents may be stored in a capillary. A capillary may be a glass capillary. In some cases, a capillary provides a controlled storage environment. A capillary may also be stored within a controlled storage environment. A capillary can store a solution containing a reagent. A capillary can store a reagent in a dry form. A capillary can be loaded with a solution containing a reagent and then be dried to yield a capillary containing a dried or powdered form of the reagent. A dried or powdered reagent may be hydrated or dissolved by filling the capillary with a solution (e.g., buffer). A reagent within a capillary may be stable when stored at room temperature. A reagent within a capillary may stable when stored at (e.g., 37° C.). A reagent within a capillary may be stable when stored below room temperature (e.g., 4 37° C.). A reagent within a capillary may be stable when stored for 1, 2, 3, 4, 5, 6, 7, 8, 9, 10, 11 or 12 months. A reagent stored within a capillary may be stable when stored for longer than a year. A reagent stored within a capillary may retain greater than 25%, 30%, 35%, 40%, 45%, 50%, 55%, 60%, 65%, 70%, 75%, 80%, 85%, 90%, 95% or 100% of its activity.

[0550] A capillary can contain an enzyme in dried form or in solution. A capillary can contain a programmable nuclease in dried form or in solution. A capillary can contain a nucleic acid in dried form or in solution. A capillary can contain an ribonucleoprotein in dried form or in solution. A capillary can contain a dye in dried form or in solution. A capillary can contain a buffer (e.g., a lysis buffer) in dried form or in solution. A capillary can contain amplification reagents in dried form or in solution.

[0551] A reagent may be removed from a capillary by flowing a solution through the capillary. A reagent may be removed from a capillary by applying pressure (e.g., hydraulic or pneumatic pressure) to an open end of the capillary. A reagent may be removed from a capillary by breaking the capillary. A capillary may be positioned so that its contents elute due to gravity. A capillary may be open at both ends. A capillary may be sealed at one or two ends.

[0552] A capillary may have an internal volume of less than 1 μl. A capillary can have an internal volume of 1 μl. A capillary can have an internal volume of 2 μl. A capillary can have an internal volume of 3 μl. A capillary can have an internal volume of 4 μl. A capillary can have an internal volume of 5 μl. A capillary can have an internal volume of between 5 and 10 μl. A capillary can have an internal volume of between 10 and 20 μl. A capillary can have an internal volume of between 20 and 30 μl. A capillary can have an internal volume of between 30 and 40 μl. A capillary can have an internal volume of between 40 and 50 μl. A capillary can have an internal volume of between 50 and 60 μl. A capillary can have an internal volume of between 60 and 70 μl. A capillary can have an internal volume of between 70 and 80 μl. A capillary can have an internal volume of between 80 and 90 μl. A capillary can have an internal volume of between 90 and 100 μl. A capillary can have an internal volume of greater than 100 μl.

[0553] The kit or system can be packaged to be stored for extended periods of time prior to use. The kit or system may be packaged to avoid degradation of the kit or system. The packaging may include desiccants or other agents to control the humidity within the packaging. The packaging may protect the kit or system from mechanical damage or thermal damage. The packaging may protect the kit or system from contamination of the reagents and programmable nuclease system. The kit or system may be transported under conditions similar to the storage conditions that result in high stability of the reagent or little loss of reagent activity. The packaging may be configured to provide and maintain sterility of the kit or system. The kit or system can be compatible with standard manufacturing and shipping operations.

### Target Amplification and Detection

[0554] A number of target amplification and detection methods are consistent with the methods, compositions, reagents, enzymes, and kits disclosed herein. As described herein, a target nucleic acid may be detected using a DNA-activated programmable RNA nuclease (e.g., a Cas13), a DNA-activated programmable DNA nuclease (e.g., a Cas12), or an RNA-activated programmable RNA nuclease (e.g., a Cas13) and other reagents disclosed herein (e.g., RNA components). The target nucleic acid may be detected using DETECTR, as described herein. The target nucleic acid may be an RNA, reverse transcribed RNA, DNA, DNA amplicon, amplified DNA, synthetic nucleic acids, or nucleic acids found in biological or environmental samples. In some cases, the target nucleic acid is amplified prior to or concurrent with detection. In some cases, the target nucleic acid is reverse transcribed prior to amplification. The target nucleic acid may be amplified via loop mediated isothermal amplification (LAMP) of a target nucleic acid sequence. In some cases, the nucleic acid is amplified using LAMP coupled with reverse transcription (RT-LAMP). The LAMP amplification may be performed independently, or the LAMP amplification may be coupled to DETECTR for detection of the target nucleic acid. The RT-LAMP amplification may be performed independently, or the RT-LAMP amplification may be coupled to DETECTR for detection of the target nucleic acid. The DETECTR reaction may be performed using any method consistent with the methods disclosed herein.

### Amplification and Detection Reaction Mixtures

[0555] In some embodiments, a LAMP amplification reaction comprises a plurality of primers, dNTPs, and a DNA polymerase. LAMP may be used to amplify DNA with high specificity under isothermal conditions. The DNA may be single stranded DNA or double stranded DNA. In some cases, a target nucleic acid comprising RNA may be reverse transcribed into DNA using a reverse transcriptase prior to LAMP amplification. A reverse transcription reaction may comprise primers, dNTPs, and a reverse transcriptase. In some cases, the reverse transcription reaction and the LAMP amplification reaction may be performed in the same reaction. A combined RT-LAMP reaction may comprise LAMP primers, reverse transcription primers, dNTPs, a reverse transcriptase, and a DNA polymerase. In some case, the LAMP primers may comprise the reverse transcription primers.

[0556] A DETECTR reaction to detect the target nucleic acid sequence may comprise a guide nucleic acid comprising a segment that is reverse complementary to a segment of the target nucleic acid and a programmable nuclease. The programmable nuclease when activated, as described elsewhere herein, exhibits sequence-independent cleavage of a reporter (e.g., a nucleic acid comprising a moiety that becomes detectable upon cleavage of the nucleic acid by the programmable nuclease). The programmable nuclease is activated upon the guide nucleic acid hybridizing to the the target nucleic acid. A combined LAMP DETECTR reaction may comprise a plurality of primers, dNTPs, a DNA polymerase, a guide nucleic acid, a programmable nuclease, and a substrate nucleic acid. A combined RT-LAMP DETECTR reaction may comprise LAMP primers, reverse transcription primers, dNTPs, a reverse transcriptase, a DNA polymerase, a guide nucleic acid, a programmable nuclease, and a substrate nucleic acid. In some case, the LAMP primers may comprise the reverse transcription primers. LAMP and DETECTR can be carried out in the same sample volume. LAMP and DETECTR can be carried out concurrently in separate sample volumes or in the same sample volume. RT-LAMP and DETECTR can be carried out in the same sample volume. RT-LAMP and DETECTR can be carried out concurrently in separate sample volumes or in the same sample volume.

### Primer Design for LAMP Amplification

[0557] A LAMP reaction may comprise a plurality of primers. A plurality of primers are designed to amplify a target nucleic acid sequence, which is shown in FIG. 61 relative to various regions of a double stranded nucleic acid. The primers can anneal to or have sequences corresponding to these various regions. As shown in FIG. 61, the target nucleic acid is 5′ of an F1c region, the F1c region is 5′ of the F2c region, and the F2c region is 5′ of the F3c region. Additionally, the B1 region is 3′ of the B2 region, and the B2 region is 3′ of the B3 region. The F3c, F2c, F1c, B1, B2, and B3 regions are shown on the lower strand in FIG. 61. An F3 region is a sequence reverse complementary to the F3c region. An F2 region is a sequence reverse complementary to the F2c region. An Fl region is a sequence reverse complementary to the F1c region. The B1c region is a sequence reverse complementary to a B1 region. The B2c region is a sequence reverse complementary to a B2 region. The B3c region is a sequence reverse complementary to a B3 region. The target nucleic acid may be 5′ of the F1c region and 3′ of the B1 region, as shown in the top configuration of FIG. 61. The target nucleic acid may be 5′ of the B1c region and 3′ of the F1 region, as shown in the bottom configuration of FIG. 61. In some embodiments, the target nucleic acid may be 5′ of the F2c region and 3′ of the F1c region. In some embodiments, the target nucleic acid may be 5′ of the B2c region and 3′ of the B1c region. In some embodiments, the target nucleic acid sequence may be 5′ of the B1 region and 3′ of the B2 region. In some embodiments, the target nucleic acid sequence may be 5′ of the F1 region and 3′ of the F2 region.

[0558] FIG. 61 also shows the structure and directionality of the various primers. The forward outer primer has a sequence of the F3 region. Thus, the forward outer primer anneals to the F3c region. The backward outer primer has a sequence of the B3 region. Thus, the backward outer primer anneals to the B3c region. The forward inner primer has a sequence of the F1c region 5′ of a sequence of the F2 region. Thus, the F2 region of the forward inner primer anneals to the F2c region and the amplified sequence forms a loop held together via hybridization of the sequence of the F1c region in the forward inner primer and the Fl region. The backward inner primer has a sequence of a B1c region 5′ of a sequence of the B2 region. Thus, the B2 region of the backward inner primer anneals to the B2c region and the amplified sequence forms a loop held together via hybridization of the sequence of the B1c region of the backward inner primer and the B1 region of the target strand.

[0559] Further, as shown in FIG. 61, the plurality of primers may additionally include a loop forward primer (LF) and/or a loop backward primer (LB). LF is positioned 3′ of the F1c region and 5′ of the F2c region. LB is positioned 5′ of the B2c region and 3′ of the B1c region. The F1, F1c, F2, F2c, F3, F3c, B1, B1c, B2, B2c, B3, and/or B3c regions are illustrated in various arrangements relative to the target nucleic acid, the PAM, and the guide RNA (gRNA), as shown in any one of FIG. 61-FIG. 63 or FIG. 71-FIG. 72. The target nucleic acid may be within the nucleic acid strand comprising the B1, B2, B3, LF, F1c, F2c, F3c, and LBc regions. The target nucleic acid may be within the nucleic acid strand comprising the F1, F2, F3, LB, B1c, B2c, B3c, and LFc regions.

[0560] A set of LAMP primers may be designed for use in combination with a DETECTR reaction. The nucleic acid may comprise a region (e.g., a target nucleic acid), to which a guide RNA hybridizes. All or part of the guide RNA sequence may be reverse complementary to all or part of the target sequence. The target nucleic acid sequence may be adjacent to a protospacer adjacent motif (PAM) 3′ of the target nucleic acid sequence. The PAM may promote interaction the programmable nuclease with the target nucleic acid. The target nucleic acid sequence may be adjacent to a protospacer flanking site (PFS) 3′ of the target nucleic acid sequence. The PFS may promote interaction the programmable nuclease with the target nucleic acid. One or more of the guide RNA, the PAM or PFS, or the target nucleic acid sequence may be specifically positioned with respect to one or more of the F1, F1c, F2, F2c, F3, F3c, LF, LFc, LB, LBc, B1, B1c, B2, B2c, B3, and/or B3c regions.

[0561] In some cases, the guide RNA is reverse complementary to a sequence of the target nucleic acid, which is between an F1c region and a B1 region, as in FIG. 62A. In some cases, the guide RNA is reverse complementary to a sequence of the target nucleic acid, which is between a B1c region and an F1 region.

[0562] In some cases, the guide RNA is partially reverse complementary to a sequence of the target nucleic acid, which is between an F1c region and a B1 region, as in FIG. 62B. In some cases, the guide RNA is partially reverse complementary to a sequence of the target nucleic acid, which is between a B1c region and an F1 region. For example, the target nucleic acid comprises a sequence between an F1c region and a B1 region or a B1c region and an F1 region that is reverse complementary to at least 60% of a guide nucleic acid. In another example, the target nucleic acid comprises a sequence between an F1c region and a B1 region that is reverse complementary to at least 10%, at least 11%, at least 12%, at least 13%, at least 14%, at least 15%, at least 16%, at least 17%, at least 18%, at least 19%, at least 20%, at least 21%, at least 22%, at least 23%, at least 24%, at least 25%, at least 26%, at least 27%, at least 28%, at least 29%, at least 30%, at least 31%, at least 32%, at least 33%, at least 34%, at least 35%, at least 36%, at least 37%, at least 38%, at least 39%, at least 40%, at least 41%, at least 42%, at least 43%, at least 44%, at least 45%, at least 46%, at least 47%, at least 48%, at least 49%, at least 50%, at least 51%, at least 52%, at least 53%, at least 54%, at least 55%, at least 56%, at least 57%, at least 58%, at least 59%, at least 60%, at least 61%, at least 62%, at least 63%, at least 64%, at least 65%, at least 66%, at least 67%, at least 68%, at least 69%, at least 70%, at least 71%, at least 72%, at least 73%, at least 74%, at least 75%, at least 76%, at least 77%, at least 78%, at least 79%, at least 80%, at least 81%, at least 82%, at least 83%, at least 84%, at least 85%, at least 86%, at least 87%, at least 88%, at least 89%, at least 90%, at least 91%, at least 92%, at least 93%, at least 94%, at least 95%, at least 96%, at least 97%, at least 98%, at least 99%, at least 100%, from 5% to 100%, from 5% to 10%, from 10% to 15%, from 15% to 20%, from 20% to 25%, from 25% to 30%, from 30% to 35%, from 35% to 40%, from 40% to 45%, from 45% to 50%, from 50% to 55%, from 55% to 60%, from 60% to 65%, from 65% to 70%, from 70% to 75%, from 75% to 80%, from 80% to 85%, from 85% to 90%, from 90% to 95%, or from 95% to 100% of a guide nucleic acid. In this arrangement, the guide RNA is not reverse complementary to the forward inner primer or the backward inner primer shown in FIG. 61.

[0563] In some cases, the guide RNA is reverse complementary to no more than 50%, no more than 40%, no more than 35%, no more than 30%, no more than 25%, no more than 20%, no more than 15%, no more than 10%, or no more than 5% of the forward inner primer, the backward inner primer, or a combination thereof the sequence between the F1c region and the B1 region or the sequence between the B1c region and the F1 region is at least 50%, at least 70%, at least 75%, at least 80%, at least 85%, at least 90%, at least 92%, at least 95%, at least 99%, or 100% reverse complementary to the guide nucleic acid sequence. In some cases, the guide nucleic acid has a sequence reverse complementary to no more than 50%, no more than 40%, no more than 35%, no more than 30%, no more than 25%, no more than 20%, no more than 15%, no more than 10%, or no more than 5% of the forward inner primer, the backward inner primer, the forward outer primer, the backward outer primer, or any combination thereof. In some cases, the guide nucleic acid sequence has a sequence reverse complementary to no more than 50%, no more than 40%, no more than 35%, no more than 30%, no more than 25%, no more than 20%, no more than 15%, no more than 10%, or no more than 5% of a sequence of an F3c region, an F2c region, the F1c region, the B1c region, an B2c region, an B3c region, or any combination thereof.

[0564] In some cases, the region corresponding to the guide RNA sequence does not overlap or hybridize to any of the primers and may further not overlap with or hybridize to any of the regions shown in FIG. 61-FIG. 63 and FIG. 71-FIG. 72.

[0565] In some cases, all or a portion of the guide nucleic acid is reverse complementary to a sequence of the target nucleic acid in a loop region. For example, all or a portion of the sequence of the target nucleic acid that hybridizes to the gRNA may be located between the B1c and B2 regions, as shown in FIG. 62C. In another example, all or a portion of the sequence of the target nucleic acid that hybridizes to the gRNA may be located between the F2c and F1c regions, as shown in FIG. 62D. In some cases, all or a portion of the sequence of the target nucleic acid that hybridizes to the gRNA may be located between the F1 and F2 regions. In some cases, all or a portion of the sequence of the target nucleic acid that hybridizes to the gRNA may be located between the B2c and B1c regions.

[0566] In some cases, a LAMP primer set may be designed using a commercially available primer design software. A LAMP primer set may be designed for use in combination with a DETECR reaction, a reverse transcription reaction, or both. In some cases, a LAMP primer set may be designed using distributed ledger technology (DLT), artificial intelligence (AI), extended reality (XR) and quantum computing, commonly called “DARQ.” In some cases, a LAMP primer set may be designed using quenching of unincorporated amplification signal reporters (QUASR) (Ball et al., Anal Chem. 2016 Apr. 5; 88(7):3562-8. doi: 10.1021/acs.analchem.5b04054. Epub 2016 Mar. 24.). These methods of designing a set of LAMP primers are provided by way of example only; other methods of designing a set of LAMP primers may be readily apparent to one skilled in the art and may be employed in any of the compositions, kits and methods described herein. Exemplary sets of LAMP primers for use in a combined RT-LAMP DETECTR reaction or LAMP-DETECTR to detect the presence of a nucleic acid sequence corresponding to a respiratory syncytial virus (RSV), an influenza A virus (IAV), an influenza B virus (IAV), or a HERC2 SNP are provided in TABLE 6.

TABLE 6
Exemplary LAMP Primers

| SEQ ID NO: | Primer Name | Primer Set | Sequence |
|---|---|---|---|
| SEQ ID NO: 148 | F3 RSV-A- | #1 | TGGAACAAGTTGTGGAGG |
| | set13 | | |
| SEQ ID NO: 149 | B3 RSV-A- | #1 | TGCAGCATCATATAGATCTTGA |
| | set13 | | |
| SEQ ID NO: 150 | FIP RSV-A- | #1 | TAGTGATGCTTTTGGGTTGTTCAAT |
| | set13 | | TGTATGAGTATGCTCAAAAATTGG |
| SEQ ID NO: 151 | BIP RSV-A- | #1 | GTGTAGTATTGGGCAATGCTGCTC |
| | set13 | | CTTGGTGTACCTCTGT |
| SEQ ID NO: 152 | LF RSV-A- | #1 | TATGGTAGAATCCTGCTTCTCC |
| | set13 | | |
| SEQ ID NO: 153 | LB RSV-A- | #1 | TGGCCTAGGCATAATGGGAGA |
| | set13 | | |
| SEQ ID NO: 154 | F3 RSV-A- | #2 | AACAAGTTGTGGAGGTGTA |
| | set14 | | |
| SEQ ID NO: 155 | B3 RSV-A- | #2 | CCATTTTCTTTGAGTTGTTCAG |
| | set14 | | |
| SEQ ID NO: 156 | FIP RSV-A- | #2 | TAGTGATGCTTTTGGGTTGTTCAA |
| | set14 | | GAGTATGCTCAAAAATTGGGTG |
| SEQ ID NO: 157 | BIP RSV-A- | #2 | GTATTGGGCAATGCTGCTGGCATA |
| | set14 | | TAGATCTTGATTCCTTGGTG |
| SEQ ID NO: 158 | LF RSV-A- | #2 | ATATGGTAGAATCCTGCTTCTC |
| | set14 | | |
| SEQ ID NO: 159 | LB RSV-A- | #2 | CCTAGGCATAATGGGAGAATAC |
| | set14 | | |
| SEQ ID NO: 154 | F3 RSV-A- | #3 | AACAAGTTGTGGAGGTGTA |
| | set15 | | |
| SEQ ID NO: 155 | B3 RSV-A- | #3 | CCATTTTCTTTGAGTTGTTCAG |
| | set15 | | |
| SEQ ID NO: 160 | FIP RSV-A- | #3 | ATAGTGATGCTTTTGGGTTGTTCA |
| | set15 | | AGTATGCTCAAAAATTGGGTG |
| SEQ ID NO: 161 | BIP RSV-A- | #3 | GCTGCTGGCCTAGGCATAATGCAT |
| | set15 | | CATATAGATCTTGATTCCTT |
| SEQ ID NO: 380 | LF RSV-A- | #3 | TATATGGTAGAATCCTGCTTCTC |
| | set15 | | |
| SEQ ID NO: 162 | LB RSV-A- | #3 | GGGAGAATACAGAGGTACAC |
| | set15 | | |
| SEQ ID NO: 163 | F3 RSV-A- | #4 | GGGTCTTAGCAAAATCAGTT |
| | set16 | | |
| SEQ ID NO: 149 | B3 RSV-A- | #4 | TGCAGCATCATATAGATCTTGA |
| | set16 | | |
| SEQ ID NO: 164 | FIP RSV-A- | #4 | GAATCCTGCTTCTCCACCCAATTG |
| | set16 | | ACACGCTAGTGTACAAGC |
| SEQ ID NO: 151 | BIP RSV-A- | #4 | GTGTAGTATTGGGCAATGCTGCTC |
| | set16 | | CTTGGTGTACCTCTGT |
| SEQ ID NO: 165 | LF RSV-A- | #4 | CCTCCACAACTTGTTCCATTTCT |
| | set16 | | |
| SEQ ID NO: 166 | LB RSV-A- | #4 | TGGCCTAGGCATAATGGGAG |
| | set16 | | |
| SEQ ID NO: 167 | F3 RSV-A- | #5 | AAGCAGAAATGGAACAAGTT |
| | set17 | | |
| SEQ ID NO: 155 | B3 RSV-A- | #5 | CCATTTTCTTTGAGTTGTTCAG |
| | set17 | | |
| SEQ ID NO: 168 | FIP RSV-A- | #5 | TAGTGATGCTTTTGGGTTGTTCAGT |
| | set17 | | GGAGGTGTATGAGTATGC |
| SEQ ID NO: 169 | BIP RSV-A- | #5 | GTAGTATTGGGCAATGCTGCTGAT |
| | set17 | | ATAGATCTTGATTCCTTGGTG |
| SEQ ID NO: 170 | LF RSV-A- | #5 | TGCTTCTCCACCCAATTTTTGA |
| | set17 | | |
| SEQ ID NO: 171 | LB RSV-A- | #5 | GCCTAGGCATAATGGGAGAATAC |
| | set17 | | |
| SEQ ID NO: 163 | F3 RSV-A- | #6 | GGGTCTTAGCAAAATCAGTT |
| | set18 | | |
| SEQ ID NO: 149 | B3 RSV-A- | #6 | TGCAGCATCATATAGATCTTGA |
| | set18 | | |
| SEQ ID NO: 172 | FIP RSV-A- | #6 | GAATCCTGCTTCTCCACCCAGACA |
| | set18 | | CGCTAGTGTACAAGC |
| SEQ ID NO: 151 | BIP RSV-A- | #6 | GTGTAGTATTGGGCAATGCTGCTC |
| | set18 | | CTTGGTGTACCTCTGT |
| SEQ ID NO: 165 | LF RSV-A- | #6 | CCTCCACAACTTGTTCCATTTCT |
| | set18 | | |
| SEQ ID NO: 166 | LB RSV-A- | #6 | TGGCCTAGGCATAATGGGAG |
| | set18 | | |
| SEQ ID NO: 173 | F3 RSV-A- | #7 | TACACAGCTGCTGTTCAA |
| | set19 | | |
| SEQ ID NO: 174 | B3 RSV-A- | #7 | GGTAAATTTGCTGGGCATT |
| | set19 | | |
| SEQ ID NO: 175 | FIP RSV-A- | #7 | TTGGAACATGGGCACCCATAAATG |
| | set19 | | TCCTAGAAAAAGACGATG |
| SEQ ID NO: 176 | BIP RSV-A- | #7 | CTAGTGAAACAAATATCCACACCC |
| | set19 | | AGCACTGCACTTCTTGAGTT |
| SEQ ID NO: 177 | LF RSV-A- | #7 | TTGTAAGTGATGCAGGAT |
| | set19 | | |
| SEQ ID NO: 178 | LB RSV-A- | #7 | AGGGACCCTCATTAAGAGTCATG |
| | set19 | | |
| SEQ ID NO: 179 | F3 RSV-A- | #8 | ATACACAGCTGCTGTTCA |
| | set20 | | |
| SEQ ID NO: 174 | B3 RSV-A- | #8 | GGTAAATTTGCTGGGCATT |
| | set20 | | |
| SEQ ID NO: 180 | FIP RSV-A- | #8 | TCTGCTGGCATGGATGATTGAATG |
| | set20 | | TCCTAGAAAAAGACGATG |
| SEQ ID NO: 176 | BIP RSV-A- | #8 | CTAGTGAAACAAATATCCACACCC |
| | set20 | | AGCACTGCACTTCTTGAGTT |
| SEQ ID NO: 181 | LF RSV-A- | #8 | CCCATATTGTAAGTGATGCAGGAT |
| | set20 | | |
| SEQ ID NO: 182 | LB RSV-A- | #8 | AGGGACCCTCATTAAGAGTCAT |
| | set20 | | |
| SEQ ID NO: 179 | F3 RSV-A- | #9 | ATACACAGCTGCTGTTCA |
| | set21 | | |
| SEQ ID NO: 183 | B3 RSV-A- | #9 | TGGTAAATTTGCTGGGCAT |
| | set21 | | |
| SEQ ID NO: 180 | FIP RSV-A- | #9 | TCTGCTGGCATGGATGATTGAATG |
| | set21 | | TCCTAGAAAAAGACGATG |
| SEQ ID NO: 184 | BIP RSV-A- | #9 | TGAAACAAATATCCACACCCAAGG |
| | set21 | | GCACTGCACTTCTTGAGTT |
| SEQ ID NO: 185 | LF RSV-A- | #9 | CCATATTGTAAGTGATGCAGGAT |
| | set21 | | |
| SEQ ID NO: 186 | LB RSV-A- | #9 | GACCCTCATTAAGAGTCATGAT |
| | set21 | | |
| SEQ ID NO: 187 | F3 RSV-A- | #10 | AACATACGTGAACAAACTTCA |
| | set22 | | |
| SEQ ID NO: 188 | B3 RSV-A- | #10 | GCACATATGGTAAATTTGCTGG |
| | set22 | | |
| SEQ ID NO: 189 | FIP RSV-A- | #10 | ACCCATATTGTAAGTGATGCAGGA |
| | set22 | | TAGGGCTCCACATACACAG |
| SEQ ID NO: 190 | BIP RSV-A- | #10 | CTAGTGAAACAAATATCCACACCC |
| | set22 | | AAGCACTGCACTTCTTGAG |
| SEQ ID NO: 191 | LF RSV-A- | #10 | TTTCTAGGACATTGTATTGAACAG |
| | set22 | | C |
| SEQ ID NO: 192 | LB RSV-A- | #10 | GGGACCCTCATTAAGAGTCATG |
| | set22 | | |
| SEQ ID NO: 193 | IAV-MP-F3 | #1 | GACTTGAAGATGTCTTTGC |
| SEQ ID NO: 194 | IAV-MP B3 | #1 | TGTTGTTTGGGTCCCCATT |
| SEQ ID NO: 195 | IAV-MP-FIP | #1 | TTAGTCAGAGGTGACAGGATTGCA |
| | | | GATCTTGAGGCTCTC |
| SEQ ID NO: 196 | IAV-MP-BIP | #1 | TTGTGTTCACGCTCACCGTGTTTGG |
| | | | ACAAAGCGTCTACG |
| SEQ ID NO: 197 | IAV-MP FL | #1 | GTCTTGTCTTTAGCCA |
| SEQ ID NO: 198 | IAV-MP BL | #1 | CAGTGAGCGAGGACTG |
| SEQ ID NO: 199 | IAV F3 v2 | #2 | ACCGAGGTCGAAACGT |
| SEQ ID NO: 200 | IAV B3 v2 | #2 | GGTCCCCATTCCCATTG |
| SEQ ID NO: 201 | IAV FIP v2 | #2 | CAAAGACATCTTCAAGTCTCTGCG |
| | | | TTTTTTCTCTCTATCGTCCCGTCA |
| SEQ ID NO: 202 | IAV BIP v2 | #2 | AATGGCTAAAGACAAGACCAATCC |
| | | | TTTTTTGTCTACGCTGCAGTCC |
| SEQ ID NO: 203 | IAV LF v2 | #2 | CGATCTCGGCTTTGAGGG |
| SEQ ID NO: 204 | IAV LB v2 | #2 | TCACCGTGCCCAGTGAG |
| SEQ ID NO: 205 | IAV F3 v3 | #3 | CGAAAGCAGGTAGATATTGAAAG |
| SEQ ID NO: 206 | IAV B3 v3 | #3 | TCTACGCTGCAGTCCTC |
| SEQ ID NO: 207 | IAV FIP v3 | #3 | TCAAGTCTCTGCGCGATCTCTTTTT |
| | | | TGAGTCTTCTAACCGAGGT |
| SEQ ID NO: 208 | IAV BIP v3 | #3 | AGATGTCTTTGCAGGGAAAAACAC |
| | | | TTTTTTCACAAATCCTAAAATCCCC |
| | | | TTAG |
| SEQ ID NO: 209 | IAV LF v3 | #3 | GACGATAGAGAGAACGTACGTTTC |
| SEQ ID NO: 210 | IAV LB v3 | #3 | AAGACCAATCCTGTCACCTCT |
| SEQ ID NO: 211 | IAV-set4-F3 | #4 | GCGAAAGCAGGTAGATATTGA |
| SEQ ID NO: 212 | IAV-set4-B3 | #4 | CATTCCCATTGAGGGCATT |
| SEQ ID NO: 213 | IAV-set4-FIP | #4 | CTTCAAGTCTCTGCGCGATCTATG |
| | | | AGTCTTCTAACCGAGGT |
| SEQ ID NO: 214 | IAV-set4-BIP | #4 | TTGAGGCTCTCATGGAATGGCAGC |
| | | | GTGAACACAAATCCTAA |
| SEQ ID NO: 215 | IAV-set4-LF | #4 | TGACGGGACGATAGAGAGAA |
| SEQ ID NO: 216 | IAV-set4-LB | #4 | ACAAGACCAATCCTGTCACC |
| SEQ ID NO: 211 | IAV-set5-F3 | #5 | GCGAAAGCAGGTAGATATTGA |
| SEQ ID NO: 212 | IAV-set5-B3 | #5 | CATTCCCATTGAGGGCATT |
| SEQ ID NO: 217 | IAV-set5-FIP | #5 | TTCAAGTCTCTGCGCGATCTCATG |
| | | | AGTCTTCTAACCGAGGT |
| SEQ ID NO: 214 | IAV-set5-BIP | #5 | TTGAGGCTCTCATGGAATGGCAGC |
| | | | GTGAACACAAATCCTAA |
| SEQ ID NO: 215 | IAV-set5-LF | #5 | TGACGGGACGATAGAGAGAA |
| SEQ ID NO: 216 | IAV-set5-LB | #5 | ACAAGACCAATCCTGTCACC |
| SEQ ID NO: 211 | IAV-set6-F3 | #6 | GCGAAAGCAGGTAGATATTGA |
| SEQ ID NO: 218 | IAV-set6-B3 | #6 | TTGGACAAAGCGTCTACG |
| SEQ ID NO: 213 | IAV-set6-FIP | #6 | CTTCAAGTCTCTGCGCGATCTATG |
| | | | AGTCTTCTAACCGAGGT |
| SEQ ID NO: 214 | IAV-set6-BIP | #6 | TTGAGGCTCTCATGGAATGGCAGC |
| | | | GTGAACACAAATCCTAA |
| SEQ ID NO: 215 | IAV-set6-LF | #6 | TGACGGGACGATAGAGAGAA |
| SEQ ID NO: 216 | IAV-set6-LB | #6 | ACAAGACCAATCCTGTCACC |
| SEQ ID NO: 211 | IAV-set7-F3 | #7 | GCGAAAGCAGGTAGATATTGA |
| SEQ ID NO: 212 | IAV-set7-B3 | #7 | CATTCCCATTGAGGGCATT |
| SEQ ID NO: 219 | IAV-set7-FIP | #7 | AAGTCTCTGCGCGATCTCGATGAG |
| | | | TCTTCTAACCGAGGT |
| SEQ ID NO: 214 | IAV-set7-BIP | #7 | TTGAGGCTCTCATGGAATGGCAGC |
| | | | GTGAACACAAATCCTAA |
| SEQ ID NO: 215 | IAV-set7-LF | #7 | TGACGGGACGATAGAGAGAA |
| SEQ ID NO: 216 | IAV-set7-LB | #7 | ACAAGACCAATCCTGTCACC |
| SEQ ID NO: 220 | IAV-set8-F3 | #8 | TCTTCTAACCGAGGTCGAA |
| SEQ ID NO: 221 | IAV-set8-B3 | #8 | CTGCTCTGTCCATGTTGTT |
| SEQ ID NO: 222 | IAV-set8-FIP | #8 | TCAGAGGTGACAGGATTGGTCTGA |
| | | | AGATGTCTTTGCAGGGAA |
| SEQ ID NO: 223 | IAV-set8-BIP | #8 | TTGTGTTCACGCTCACCGTCATTCC |
| | | | CATTGAGGGCATT |
| SEQ ID NO: 224 | IAV-set8-LF | #8 | ATTCCATGAGAGCCTCAAGATC |
| SEQ ID NO: 225 | IAV-set8-LB | #8 | GAGGACTGCAGCGTAGAC |
| SEQ ID NO: 226 | IAV-set9-F3 | #9 | TTCTCTCTATCGTCCCGTC |
| SEQ ID NO: 221 | IAV-set9-B3 | #9 | CTGCTCTGTCCATGTTGTT |
| SEQ ID NO: 227 | IAV-set9-FIP | #9 | CCCTTAGTCAGAGGTGACAGGAAC |
| | | | ACAGATCTTGAGGCTCT |
| SEQ ID NO: 223 | IAV-set9-BIP | #9 | TTGTGTTCACGCTCACCGTCATTCC |
| | | | CATTGAGGGCATT |
| SEQ ID NO: 228 | IAV-set9-LF | #9 | GGTCTTGTCTTTAGCCATTCCA |
| SEQ ID NO: 225 | IAV-set9-LB | #9 | GAGGACTGCAGCGTAGAC |
| SEQ ID NO: 229 | IAV-set10-F3 | #10 | GTCTTCTAACCGAGGTCGA |
| SEQ ID NO: 221 | IAV-set10-B3 | #10 | CTGCTCTGTCCATGTTGTT |
| SEQ ID NO: 230 | IAV-set10-FIP | #10 | GAGGTGACAGGATTGGTCTTGTTG |
| | | | AAGATGTCTTTGCAGGG |
| SEQ ID NO: 223 | IAV-set10-BIP | #10 | TTGTGTTCACGCTCACCGTCATTCC |
| | | | CATTGAGGGCATT |
| SEQ ID NO: 224 | IAV-set10-LF | #10 | ATTCCATGAGAGCCTCAAGATC |
| SEQ ID NO: 225 | IAV-set10-LB | #10 | GAGGACTGCAGCGTAGAC |
| SEQ ID NO: 231 | IAV-set11-F3 | #11 | AAGAAGACAAGAGATATGGC |
| SEQ ID NO: 232 | IAV-set11-B3 | #11 | CAATTCGACACTAATTGATGGC |
| SEQ ID NO: 233 | IAV-set11-FIP | #11 | GTCTCCTTGCCCAATTAGCAAGCA |
| | | | TCAATGAACTGAGCA |
| SEQ ID NO: 234 | IAV-set11-BIP | #11 | GTGGTGTTGGTAATGAAACGAAGC |
| | | | TGTCTGGCTGTCAGTA |
| SEQ ID NO: 235 | IAV-set11-LF | #11 | ACATTAGCCTTCTCTCCTTT |
| SEQ ID NO: 236 | IAV-set11-LB | #11 | AACGGGACTCTAGCATACT |
| SEQ ID NO: 237 | M605 F3 IBV | IBV | AGGGACATGAACAACAAAGA |
| | LAMP | | |
| SEQ ID NO: 238 | M606 B3 IBV | IBV | CAAGTTTAGCAACAAGCCT |
| | LAMP | | |
| SEQ ID NO: 239 | M607 FIP IBV | IBV | TCAGGGACAATACATTACGCATAT |
| | LAMP | | CGATAAAGGAGGAAGTAAACACT |
| | | | CA |
| SEQ ID NO: 240 | M608 BIP IBV | IBV | TAAACGGAACATTCCTCAAACACC |
| | LAMP | | ACTCTGGTCATATGCATTC |
| SEQ ID NO: 241 | M609 LF IBV | IBV | TCAAACGGAACTTCCCTTCTTTC |
| | LAMP | | |
| SEQ ID NO: 242 | M610 LB IBV | IBV | GGATACAAGTCCTTATCAACTCTG |
| | LAMP | | C |
| SEQ ID NO: 243 | M948 F3 | HERC2 | CTTGTAATCAACATCAGGGTAA |
| | HERC2 set3 | | |
| SEQ ID NO: 244 | M949 B3 | HERC2 | AGAAACGACAAGTAGACCATT |
| | HERC2 set3 | | |
| SEQ ID NO: 245 | M950 FIP | HERC2 | CGCCTCTTGGATCAGACACATGTG |
| | HERC2 set3 | | TTAATACAAAGGTACAGGA |
| SEQ ID NO: 246 | M951 BIP | HERC2 | CACGCTATCATCATCAGGGGCTGC |
| | HERC2 set3 | | TTCAAGTGTATATAAACTCAC |
| SEQ ID NO: 247 | M952 LF | HERC2 | GAGAGCCATGAAGAACAAATTCT |
| | HERC2 set3 | | |
| SEQ ID NO: 248 | M953 LB | HERC2 | CGAGGCTTCTCTTTGTTTTTAAT |
| | HERC2 set3 | | |

[0567] A set of LAMP primers may be designed for use in combination with a DETECTR reaction to detect a single nucleotide polymorphism (SNP) in a target nucleic acid. In some embodiments, a sequence of the target nucleic acid comprising the SNP may be reverse complementary to all or a portion of the guide nucleic acid. For example, the SNP may be positioned within a sequence of the target nucleic acid that is reverse complementary to the guide RNA sequence, as illustrated in FIG. 72C. In some cases, the sequence of the target nucleic acid sequence comprising the SNP does not overlap with or is not reverse complementary to the primers or one or more of the F1, F1c, F2, F2c, F3, F3c, B1, B1c, B2, B2c, B3, B3c, LB, LBc, LF, or LFc regions shown in FIG. 71. The guide nucleic acid may be reverse complementary to a sequence of the target nucleic acid between the F1c and B1 regions, as illustrated in FIG. 72A. The guide nucleic acid may be reverse complementary to a sequence of the target nucleic acid between the B1c and F1 regions. A guide nucleic acid may be partially reverse complementary to a sequence of the target nucleic acid between the F1c region and the B1 region, for example as illustrated in FIG. 72B. A guide nucleic acid may be partially reverse complementary to a sequence of the target nucleic acid between the B1c region and the F1 region. For example, the sequence of the target nucleic acid sequence having the SNP may be reverse complementary to at least 10%, at least 11%, at least 12%, at least 13%, at least 14%, at least 15%, at least 16%, at least 17%, at least 18%, at least 19%, at least 20%, at least 21%, at least 22%, at least 23%, at least 24%, at least 25%, at least 26%, at least 27%, at least 28%, at least 29%, at least 30%, at least 31%, at least 32%, at least 33%, at least 34%, at least 35%, at least 36%, at least 37%, at least 38%, at least 39%, at least 40%, at least 41%, at least 42%, at least 43%, at least 44%, at least 45%, at least 46%, at least 47%, at least 48%, at least 49%, at least 50%, at least 51%, at least 52%, at least 53%, at least 54%, at least 55%, at least 56%, at least 57%, at least 58%, at least 59%, at least 60%, at least 61%, at least 62%, at least 63%, at least 64%, at least 65%, at least 66%, at least 67%, at least 68%, at least 69%, at least 70%, at least 71%, at least 72%, at least 73%, at least 74%, at least 75%, at least 76%, at least 77%, at least 78%, at least 79%, at least 80%, at least 81%, at least 82%, at least 83%, at least 84%, at least 85%, at least 86%, at least 87%, at least 88%, at least 89%, at least 90%, at least 91%, at least 92%, at least 93%, at least 94%, at least 95%, at least 96%, at least 97%, at least 98%, at least 99%, at least 100%, from 5% to 100%, from 5% to 10%, from 10% to 15%, from 15% to 20%, from 20% to 25%, from 25% to 30%, from 30% to 35%, from 35% to 40%, from 40% to 45%, from 45% to 50%, from 50% to 55%, from 55% to 60%, from 60% to 65%, from 65% to 70%, from 70% to 75%, from 75% to 80%, from 80% to 85%, from 85% to 90%, from 90% to 95%, or from 95% to 100% of the guide nucleic acid. In some cases, the guide nucleic acid does not overlap with and/or is not reverse complementary to any of the plurality of primers or the F1, F1c, F2, F2c, F3, F3c, B1, B1c, B2, B2c, B3, B3c, LB, LBc, LF, or LFc regions. Exemplary sets of DETECTR gRNAs for use in a combined RT-LAMP DETECTR or LAMP-DETECTR reaction to detect the presence of a nucleic acid sequence corresponding to a respiratory syncytial virus (RSV), an influenza A virus (IAV), an influenza B virus (IAV), or a HERC2 SNP are provided in TABLE 7.

TABLE 7
Exemplary DETECTR Guide RNAs

| SEQ ID NO: | gRNA Name | Sequence |
|---|---|---|
| SEQ ID NO: 249 | gRNA #1 (R1118) | UAAUUUCUACUAAGUGUAGAUCUUAUAA |
| | | AAGAACUAGCCAA |
| SEQ ID NO: 250 | gRNA #2 (R288) | UAAUUUCUACUAAGUGUAGAUACUCAAU |
| | | UUCCUCACUUCUC |
| SEQ ID NO: 251 | R283 | UAAUUUCUACUAAGUGUAGAUUGUUCAC |
| | | GCUCACCGUGCCC |
| SEQ ID NO: 252 | R781 | UAAUUUCUACUAAGUGUAGAUGCCAUUC |
| | | CAUGAGAGCCUCA |
| SEQ ID NO: 253 | R782 | UAAUUUCUACUAAGUGUAGAUGACAAAG |
| | | CGUCUACGCUGCA |
| SEQ ID NO: 254 | IBV (R778) | UAAUUUCUACUAAGUGUAGAUCUAACAC |
| | | UCUCAGGGACAAU |
| SEQ ID NO: 255 | A SNP Position 9 | UAAUUUCUACUAAGUGUAGAUAGCAUUA |
| | (R570) | AAUGUCAAGUUCU |
| SEQ ID NO: 256 | G SNP Position 9 | UAAUUUCUACUAAGUGUAGAUAGCAUUA |
| | (R571) | AGUGUCAAGUUCU |
| SEQ ID NO: 257 | A SNP Position 14 | UAAUUUCUACUAAGUGUAGAUAUUUGAG |
| | (R1138) | CAUUAAAUGUCAA |
| SEQ ID NO: 258 | G SNP Position 14 | UAAUUUCUACUAAGUGUAGAUAUUUGAG |
| | (R1139) | CAUUAAGUGUCAA |

### Amplification and Detection of a Single Nucleotide Polymorphism Allele

[0568] A DETECTR reaction may be used to detect the presence of a specific single nucleotide polymorphism (SNP) allele in a sample. The DETECTR reaction may produce a detectable signal, as described elsewhere herein, in the presence of a target nucleic acid comprising a specific SNP allele. The DETECTR reaction may not produce a signal in the absence of the target nucleic acid or in the presence of a nucleic acid sequence that does not comprise the specific SNP allele or comprises a different SNP allele. In some cases, a DETECTR reaction may comprise a guide RNA reverse complementary to a portion of a target nucleic acid sequence comprising a specific SNP allele. The guide RNA and the target nucleic acid comprising the specific SNP allele may bind to and activate a programmable nuclease, thereby producing a detectable signal as described elsewhere herein. The guide RNA and a nucleic acid sequence that does not comprise the specific SNP allele may not bind to or activate the programmable nuclease and may not produce a detectable signal. In some cases, a target nucleic acid sequence that may or may not comprise a specific SNP allele may be amplified using, for example, a LAMP amplification reaction. In some cases, the LAMP amplification reaction may be combined with a reverse transcription reaction, a DETECTR reaction, or both. For example, the LAMP reaction may be an RT-LAMP reaction, a LAMP DETECTR reaction, or an RT-LAMP DETECTR reactions.

[0569] A DETECTR reaction, as described elsewhere herein, may produce a detectable signal specifically in the presence of a target nucleic acid sequence comprising a specific SNP allele. For example, the DETECTR reaction may produce a detectable signal in the presence of a target nucleic acid comprising a G nucleic acid at a location of a SNP but not in the presence of a nucleic acid comprising a C, a T, or an A nucleic acid at the location of the SNP. The DETECTR reaction may produce a detectable signal in the presence of a target nucleic acid comprising a T nucleic acid at a location of a SNP but not in the presence of a nucleic acid comprising a G, a C, or an A nucleic acid at the location of the SNP. The DETECTR reaction may produce a detectable signal in the presence of a target nucleic acid comprising a C nucleic acid at a location of a SNP but not in the presence of a nucleic acid comprising a G, a T, or an A nucleic acid at the location of the SNP. The DETECTR reaction may produce a detectable signal in the presence of a target nucleic acid comprising an A nucleic acid at a location of a SNP but not in the presence of a nucleic acid comprising a G, a T, or a C nucleic acid at the location of the SNP. In addition to the DETECTR reaction, the target nucleic acid having the SNP may be concurrently, sequentially, concurrently together in a sample, or sequentially together in a sample be carried out alongside LAMP or RT-LAMP. For example, the reactions can comprise LAMP and DETECTR reactions, or RT-LAMP and DETECTR reactions. Performing a DETECTR reaction in combination with a LAMP reaction may result in an increased detectable signal as compared to the DETECTR reaction in the absence of the LAMP reaction.

[0570] In some cases, the detectable signal produced in the DETECTR reaction may be higher in the presence of a target nucleic acid comprising a specific SNP allele than in the presence of a nucleic acid that does not comprise the specific SNP allele. In some cases, the DETECTR reaction may produce a detectable signal that is at least 1-fold, at least 2-fold, at least 3-fold, at least 4-fold, at least 5-fold, at least 10-fold, at least 20-fold, at least 30-fold, at least 40-fold, at least 50-fold, at least 100-fold, at least 200-fold, at least 300-fold, at last 400-fold, at least 500-fold, at least 1000-fold, at least 2000-fold, at least 3000-fold, at least 4000-fold, at least 5000-fold, at least 6000-fold, at least 7000-fold, at least 8000-fold, at least 9000-fold, at least 10000-fold, at least 50000-fold, at least 100000-fold, at least 500000-fold, or at least 1000000-fold greater in the presence of a target nucleic acid comprising a specific SNP allele than in the presence of a nucleic acid that does not comprise the specific SNP allele. In some cases, the DETECTR reaction may produce a detectable signal that is from 1-fold to 2-fold, from 2-fold to 3-fold, from 3-fold to 4-fold, from 4-fold to 5-fold, from 5-fold to 10-fold, from 10-fold to 20-fold, from 20-fold to 30-fold, from 30-fold to 40-fold, from 40-fold to 50-fold, from 50-fold to 100-fold, from 100-fold to 500-fold, from 500-fold to 1000-fold, from 1000-fold to 10,000-fold, from 10,000-fold to 100,000-fold, or from 100,000-fold to 1,000,000-fold greater in the presence of a target nucleic acid comprising a specific SNP allele than in the presence of a nucleic acid that does not comprise the specific SNP allele.

[0571] A DETECTR reaction may be used to detect the presence of a SNP allele associated with a disease or a condition in a nucleic acid sample. The DETECTR reaction may be used to detect the presence of a SNP allele associated with an increased likelihood of developing a disease or a condition in a nucleic acid sample. The DETECTR reaction may be used to detect the presence of a SNP allele associated with a phenotype in a nucleic acid sample. For example, a DETECTR reaction may be used to detect a SNP allele associated with a disease such as phenylketonuria (PKU), cystic fibrosis, sickle-cell anemia, albinism, Huntington's disease, myotonic dystrophy type 1, hypercholesterolemia, neurofibromatosis, polycystic kidney disease, hemophilia, muscular dystrophy, hypophosphatemic rickets, Rat's syndrome, or spermatogenic failure. A DETECTR reaction may be used to detect a SNP allele associated with an increased risk of cancer, for example bladder cancer, brain cancer, breast cancer, cervical cancer, colon cancer, colorectal cancer, gallbladder cancer, stomach cancer, leukemia, liver cancer, lung cancer, oral cancer, esophageal cancer, ovarian cancer, pancreatic cancer, prostate cancer, skin cancer, testicular cancer, thyroid cancer, neuroblastoma, or lymphoma. A DETECTR reaction may be used to detect a SNP allele associated with an increased risk of a disease, for example Alzheimer's disease, Parkinson's disease, amyloidosis, heterochromatosis, celiac disease, macular degeneration, or hypercholesterolemia. A DETECTR reaction may be used to detect a SNP allele associated with a phenotype, for example, eye color, hair color, height, skin color, race, alcohol flush reaction, caffeine consumption, deep sleep, genetic weight, lactose intolerance, muscle composition, saturated fat and weight, or sleep movement.

### Definitions

[0572] Unless otherwise defined, all technical terms used herein have the same meaning as commonly understood by one of ordinary skill in the art to which this invention belongs. As used in this specification and the appended claims, the singular forms “a,” “an,” and “the” include plural references unless the context clearly dictates otherwise. Any reference to “or” herein is intended to encompass “and/or” unless otherwise stated.

[0573] As used herein, the term “comprising” and its grammatical equivalents specifies the presence of stated features, integers, steps, operations, elements, and/or components, but do not preclude the presence or addition of one or more other features, integers, steps, operations, elements, components, and/or groups thereof. As used herein, the term “and/or” includes any and all combinations of one or more of the associated listed items.

[0574] Unless specifically stated or obvious from context, as used herein, the term “about” in reference to a number or range of numbers is understood to mean the stated number and numbers +/−10% thereof, or 10% below the lower listed limit and 10% above the higher listed limit for the values listed for a range.

[0575] As used herein the terms “individual,” “subject,” and “patient” are used interchangeably and include any member of the animal kingdom, including humans.

[0576] As used herein the term “antibody” refers to, but not limited to, a monoclonal antibody, a synthetic antibody, a polyclonal antibody, a multispecific antibody (including a bi-specific antibody), a human antibody, a humanized antibody, a chimeric antibody, a single-chain Fvs (scFv) (including bi-specific scFvs), a single chain antibody, a Fab fragment, a F(ab′) fragment, a disulfide-linked Fvs (sdFv), or an epitope-binding fragment thereof. In some cases, the antibody is an immunoglobulin molecule or an immunologically active portion of an immunoglobulin molecule. In some instances, an antibody is animal in origin including birds and mammals. Alternately, an antibody is human or a humanized monoclonal antibody.

[0577] FIG. 1 shows a schematic, which from left to right shows, Steps 1 to 4 of a workflow. Under Step 1 is “sample preparation” in an oval. Under Step 2 is “nucleic acid amplification” in an oval. Under Step 3 is “programmable nuclease reaction incubation” in a rectangle. Under Step 4 is “detection (readout)” in a rectangle.

[0578] FIG. 2 depicts at right a filtration device shaped like a syringe. At left are three samples, which from top to bottom are cheek/facial swab, urine specimen collector, and fingerprint.

[0579] FIG. 3 shows at top a schematic entitled “device 2.1-essentials elements only/no amplification”. A sample is depicted entering through P1, which is connected vertically below to V1. V1 is adjacent to V2, which is connected vertically above to P2 through which pre-complexed programmable nuclease mix is introduced. To the right of V1 is a twisted region labeled S1. To the right of S1 is an incubation and detection chamber, labeled C1. To the right of C1 is V3, which is connected vertically above to P3, which is the collection outlet. Shown in the middle of the schematic is a fluidic device entitled “device 2.2-one-chamber reaction with amplification. A sample is depicted entering through P1, which is connected vertically below to V1. V1 is adjacent to V2, which is connected vertically above to P2 through which amplification mix is introduced. V2 is adjacent to V2, which connected vertically above to P3 through which pre-complexed programmable nuclease mix is introduced. To right of V3 is a twisted region labeled S1. To the right of S1 is an incubation and detection chamber, labeled C1. To the right of C1 is V4, which is connected vertically above to P4, which is the collection outlet. Shown at bottom is another fluidic device entitled “device 2.3-two-chamber reaction with amplification”. A sample is depicted entering through P1, which is connected vertically below to V1. V1 is adjacent to V2, which is connected vertically above to P2 through which amplification mix is introduced. To the right of V2 is a twisted region labeled S1. To the right of S1 is an incubation chamber labeled C1. To the right of C1 is V3, which is connected vertically above to P3, through which pre-complexed programmable nuclease mix is introduced. To the right of V3 is another serpentine region labeled S2. To the right of S2 is an incubation and detection chamber labeled C2. To the right of C2 is V4, which is connected vertically above to P4, which is the collection outlet.

[0580] FIG. 4 shows at top is “(a) fluorescence readout” and depicts a rectangular chip substrate surface with a thin film planar heater shown as a colored in rectangular region. Above the chip is a drawing of a fluorescence excitation/detection apparatus. Shown below is a “(b) electrochemical readout”. The electrochemical readout shows two schematics. The top schematic is titled “solid-phase detection using streptavidin signal amplification”. At left is a rectangular surface depicting the top chamber surface coated with ssDNA labeled with biotin, which is shown as stars. Directly below is an electrode surface with streptavidin, which is sown as hexagons. Shown to the right of the functionalized chambers is a graph of voltage on the x-axis versus current on the y-axis, where the graph is titled “LOW”. To the right is an arrow showing introduction of a programmable nuclease, which is depicted as a pair of scissors, and which is shown to cleave the biotin off the top surface. The biotin is depicted as attached to the streptavidin. Shown further to the right is a graph of voltage on the x-axis versus current on the y-axis, where the graph is titled “HIGH”. Shown below is the second schematic titled “solid-phase detection using immobilized electroactive oligos”. Shown at the left of the schematic is a rectangular electrode surface with ssNA/Fc-NTP. The surface is functionalize with electroactive moieties depicted as tree-like structures with ferrocene shown in circles. To the right is a graph of voltage on the x-axis versus current on the y-axis and where the graph is titled “HIGH”. Further to the right is an arrow showing introduction of a programmable nuclease, which is depicted as a pair of scissors, and which is shown to cleave the Fc circles. Further to the right is a graph of voltage on the x-axis versus current on the y-axis and where the graph is titled “LOW”.

[0581] FIG. 5 shows a sample being introduced at P1, which is connected vertically below to V1. V1 is adjacent to V2, which is connected vertically above to isothermal amplification mix. To the right of V2 is a serpentine channel labeled S1. Further to the right is an incubation chamber labeled C1. To the right of C1 is V3, which is connected vertically above to P3, through which pre-complexed programmable nuclease mix is introduced. To the right of V3 is another serpentine channel labeled S2 and further to the right is another incubation chamber labeled C2. To the right of C2 is V4, which is connected vertically above to P4 through which sucrose or a colorimetric reagent is introduced. To the right of V4 is another serpentine channel labeled S3 and further to the right is a detection chamber labeled C3 To the right of C3 is V5, which is connected vertically above to P5. Below is an exploded view diagram of the C2 incubation chamber. The schematic is of a top chamber depicted as a rectangle with a label reading “top chamber surface coated with ssNA conjugated to invertase. Invertase is shown in rectangular boxes labeled “Inv”. Below the top chamber is a structure showing a bottom chamber surface with a thin-film planar heater. Further to the right is an arrow showing introduction of a programmable nuclease, which is depicted as a pair of scissors, and which is shown to cleave the Invertase. Further below is an exploded view diagram of the detection chamber labeled C3. This exploded view diagram shows at top a schematic labeled “(a) optical readout using DNS, or other compound”. At top is “(a) optical readout using DNS, or other compound” and depicts a rectangular chip substrate surface with a thin film planar heater shown as a colored in rectangular region. Above the chip is a camera, or optical sensor. At bottom is “(b) electrochemical readout (electrochemical analyzer or glucometer”, which from left to right shows an electrode surface with immobilized glucose oxidase, which is depicted as a rectangle with an oval labeled “GOx”. Above the functionalized electrode surface is a flow diagram which from left to right shows sucrose, an arrow to the right with “Inv” directly above it, and fructose+glucose at the right. To the right of the functionalized electrode surface is a graph of voltage on the x-axis versus current on the y-axis, below which is an electronic reader indicating “LOW”. Further to the right is glucose interacting with the GOx functioanlized electrode surface resoluting in H2)2+F-glucono-δ-lactone. To the right is a graph of voltage on the x-axis versus current on the y-axis, below which is an electronic reader indicating “HIGH”. Below is a key showing that an invertase-labeled oligo is depicted as a line with a rectangle labeled “Inv”. Programmable nuclease is depicted as a pair of scissors. The molecular structure of DNS is shown. Glucose oxidase is an oval labeled as GOx.

[0582] FIG. 9 depicts a line graph of raw fluorescence over time. The x-axis shows time in minutes from 0.0 to 20.0 in increments of 2.5. The y-axis shows raw fluorescence from 0 to 3,500,000 in increments of 500,000. The lines depict targets corresponding to Low pH, RT-pool, Low pH+heat, GenMark pool, Deoxycholate, Deoxycholate+heat, CHAPS, CHAPS+heat, Deoxycholate+Urea, Deoxycholate+Urea+heat, Nucleospin gold std, Triton X-100, 10e4, and NTC. The cRNA is IAV. The highest lines on the graph correspond to RT-pool, Low pH, and GenMark pool. The remaining lines, in order from upper left to lower right, correspond to NucleoSpin gold std, Doxycholate and CHAPS+Urea (approximately equal), Low pH+heat, CHAPS+heat, CHAPS+Urea+heat, Triton X-100, Deoxycholate+Urea, 10e4, and Deoxycholate+Urea+heat. NTC is a flat line at about 1,500,000.

[0583] FIG. 10 depicts a line graph of raw fluorescence over time. The x-axis shows time in minutes from 0.0 to 20.0 in increments of 2.5. The y-axis shows raw fluorescence from 1,000,000 to 3,000,000 in increments of 1,000,000. The lines depict targets corresponding to Low pH 0 min, Low pH 3 min, Low pH 5 min, Low pH 10 min, Low pH 15 min, Low pH No EtOH, Low pH+heat 50, Low pH+heat 100, Untreated, RT-pool, 10e5, 10e4, 10e3, and NTC. The crRNA is IAV. The two highest lines correspond to Low pH 0 min and RT-pool. The remaining lines, from upper left to lower right, correspond to Low pH 5 min, Low pH No EtOH, Low pH 15 min, Low pH 10 min, 10e5, Low pH +heat 100, Low pH +heat 50, Untreated, 10e4, 10e3, and NTC.

[0584] FIG. 15 depicts a flow chart and two line graphs. The flow chart shows four boxes. The top box reads “DNA/RNA.” The remaining three boxes read, from top to bottom, “RPA/RT-RPA,” “In vitro transcription,” and “Cas13a Detection.” Both plots show raw fluorescence over time. The x-axis shows minutes from 0 to 40 in increments of 10. The y-axis shows raw fluorescence (AU) from 0 to 60,000 in increments of 20,000. Both plots show two sets of two lines corresponding to on-target and off-target each at 500 aM (solid lines), and on-target and off-target each at 0 aM (dashed lines). The left plot depicts PPRV. In the left plot, the line corresponding to on-target at 500 aM rises over time. The remaining lines appear approximately flat. The right plot shows PPRV-noIVT. All four lines are approximately flat.

[0585] FIG. 17 depicts a flow chart and four line graphs. The flow chart shows four boxes. The top box reads “DNA/RNA.” The remaining three boxes read, from top to bottom, “RPA/RT-RPA,” “In vitro transcription,” and “Cas13a Detection.” All four plots show raw fluorescence over time. The x-axis of all four plots shows minutes from 0 to 20 in increments of 10. The y-axis of all four plots shows raw fluorescence (AU) from 0 to 25,000 in increments of 5,000. All four plots show two lines corresponding to crRNA on-target and off-target. The upper left plot shows +RT and +UMT. The on-target line rises over time, and the off-target line appears approximately flat. The lower left plot shows +RT and −UMT. The on-target line rises over time, and the off-target line appears approximately flat. The upper right plot shows −RT and +UMT. Both lines appear approximately flat. The lower right plot shows −RT and −UMT. Both lines appear approximately flat, but the on-target line is above the off-target line.

[0586] FIG. 20B shows a bar graph depicting time to result (lower is better). The graph shows six sets of four bars each. The six sets of bars correspond to temperatures (C) of, from left to right, of 74, 72, 70, 68, 66, and 64, as shown on the x-axis. The four bars in each set show, from left to right, Hela-total-RNA, Mouse-liver-RNA, Hela-DNA, and NTC. The y-axis shows time to result (minutes) from 0 to 40 in increments of 5. At all six temperatures, the bars corresponding to Mouse-liver-RNA and NTC have a time to result of 40 or more. At all six temperatures, Hela-total-RNA is the next highest, and Hela-DNA is the lowest.

[0587] FIG. 20C depicts three line graphs corresponding to, from left to right, crRNA=off-target, crRNA=on-target #1, and crRNA=on-target #2. For all three plots, the x-axis shows minutes from 0 to 75 in increments of 25, and the y-axis shows raw fluorescence (AU) from 0 to 1,500,000 in increments of 500,000. Each plot depicts three lines corresponding to Targets, the lines representing Hela-RNA, Hela-DNA, Mouse-liver RNA, and NTC. On the left plot and the right plot, all four lines are approximately flat. In the middle plot, the lines corresponding to Hela-DNA and Hela-RNA rise over time, with Hela-DNA being the highest. Mouse-liver-RNA and NTC are the lowest.

[0588] FIG. 21 depicts a flow chart and six line graphs. The flow chart shows three boxes labeled, from top to bottom, “DNA/RNA,” “LAMP/RT-LAMP,” and “Cas12a Detection.” The six line graphs show fluorescence over time. In all six plots, the x-axis shows minutes from 0 to 75 in increments of 25, and the y-axis shows raw fluorescence (AU) from 0 to 60,000 in increments of 20,000. All six plots show three lines corresponding to different crRNAs. The three lines show on-target #1, on-target #2, and off-target. The upper left plot shows Primers =IAV1, Target =IAV. The line corresponding to on-target #2 rises over time and is the highest. The line corresponding to off-target rises slightly over time. The line corresponding to on-target #1 appear approximately flat. The upper middle plot shows Primers=IAV2, Target=IAV. The line corresponding to on-target #2 rises over time and is the highest. The line corresponding to on-target #1 rises over time, but is not as high as on-target #2. The line corresponding to off-target rises slightly over time and is the lowest. The upper right plot shows Primers=IAV3, Target=IAV. The line corresponding to on-target #1 rises over time and is the highest. The line corresponding to off-target rises slightly over time, but is not as high as on-target #1. The line corresponding to on-target #2 appear low on the graphs and appear approximately flat. The lower left plot shows Primers=IAV1, Target=NTC. The line corresponding to on-target #2 rises over time and is the highest. The line corresponding to off-target rises slightly over time, but is not as high as on-target #2. The line corresponding to on-target #1 appears approximately flat. The lower middle plot shows Primers=IAV2, Target=NTC. The line corresponding to off target rises slightly over time. The lines corresponding to on-target #1 and on-target #2 appear approximately flat. The lower right plot shows Primers=IAV3, Target=NTC. The line corresponding to off target rises slightly over time. The lines corresponding to on-target #1 and on-target #2 appear low on the graphs and look approximately flat.

[0589] FIG. 22 depicts a flow chart and three line graphs. The flow chart shows three boxes labeled, from top to bottom, “DNA/RNA,” “LAMP/RT-LAMP,” and “Cas12a Detection.” The three line graphs show fluorescence over time. In all three plots, the x-axis shows minutes from 0 to 75 in increments of 25, and the y-axis shows raw fluorescence (AU) from 0 to 60,000 in increments of 20,000. All three plots show three lines corresponding to different crRNAs. The three lines IBV #1, IBV #2, and IBV #3. The left plot shows Target=IAV. All three lines appear approximately flat. The middle plot shows Target =IBV. The line corresponding to IBV #3 rises over time and is the highest. The line corresponding to IBV #2 rises over time, but not as rapidly as IBV #3. The line corresponding to IBV #1 appears approximately flat. The right plot shows Target=NTC. All three lines appear approximately flat.

[0590] FIG. 24B shows six line graphs. In all six plots, the x-axis shows minutes from 0 to 75 in increments of 25, and the y-axis shows raw fluorescence (AU) from 0 to 60,000 in increments of 20,000. All six plots show two lines corresponding to concentrations of 10000 and 0. The upper left plot shows Target=IAV, crRNA=IAV. The line corresponding to 10000 rises over time and is the highest. The line corresponding to 0 appear approximately flat. The upper middle plot shows Target=IBV, crRNA=IAV. Neither line is visible. The upper right plot shows Target=IAV and IBV, crRNA=IAV. The line corresponding to 10000 rises over time and is the highest. The line corresponding to 0 appears approximately flat. The lower left plot shows Target =IAV, crRNA=IBV. Neither line is visible. The lower middle plot shows Target=IBV, crRNA=IBV. The line corresponding to 10000 rises over time and is the highest. The line corresponding to 0 appear approximately flat. The lower right plot shows Target=IAV and IBV, crRNA=IBV. The line corresponding to 10000 rises over time and is the highest. The line corresponding to 0 appears approximately flat.

[0591] FIG. 25 depicts a flow chart and four line graphs. The flow chart has five boxes. The top box reads “viral RNA,” the middle box reads “multiplexed RN-LAMP,” and the remaining boxes read, from left to right, “Cas12 Influenza A detection,” “Cas12 Influenza B detection,” and “Cas12a internal amp. detection.” The four plots depict fluorescence over time. The x-axis of all four plots shows minutes from 0 to 80 in increments of 20, and the y-axis shows raw fluorescence (AU) from 0 to 50,000 in increments of 10,000. Each plot shows three lines corresponding to different crRNAs, IAV, IBV, and Mammoth IAC. The left-most plot depicts IAV. The line corresponding to IAV rises over time. The second plot from the left shows IBV. The line corresponding to IBV rises over time. The second plot from the right depicts IAV and IBV. The line corresponding to IBV rises over time and is the highest. The line corresponding to IAV rises over time, but is not as high as IBV. The right-most plot depicts IAV, IBV, and Mammoth IAC. The line corresponding to IBV rises over time and is the highest. The line corresponding to Mammoth IAC rises over time, but is not as high as IBV. The line corresponding to IAV appears approximately flat.

[0592] FIG. 49C shows six line plots depicting fluorescence over time. In all six plots the x-axis shows minutes from 0 to 75 in increments of 25, and the y-axis shows normalized fluorescence from 0.0 to 1.0 in increments of 0.2. Each plot depicts two sets of four lines. The first set of four lines shows concentrations (nM) of 2.5, 0.25, 0.025, and 0 with an RNA-FQ reporter (solid lines). The second set of four lines shows concentrations (nM) of 2.5, 0.25, 0.025, and 0 with an DNA-FQ reporter (dashed lines). The top left plot shows target=RNA, protein=Cas13M26 (LbuCas13a having a sequence of SEQ ID NO: 131). The lines corresponding to 2.5 RNA-FQ, 0.25 RNA-FQ, and 0.0025 RNA-FQ rise over time. The line corresponding to 2.5 RNA-FQ is the highest, followed by the line corresponding to 0.25 RNA-FQ, and the line corresponding to 0.025 RNA-FQ is the lowest of the three. The remaining lines are not distinguishable from the baseline. The top middle plot shows target=ssDNA, protein=Cas13M26. The lines corresponding to 2.5 RNA-FQ and 0.25 RNA-FQ rise over time. The line corresponding to 2.5 RNA-FQ is the highest, followed by the line corresponding to 0.25 RNA-FQ. The remaining lines are not distinguishable from the baseline. The top right plot shows target=dsDNA, protein=Cas13M26. None of the lines are distinguishable from baseline. The bottom left plot shows target=RNA, protein=Cas12M08 (a variant within the Cas12 family having a sequence of SEQ ID NO: 37). None of the lines are distinguishable from baseline. The bottom middle plot shows target=ssDNA, protein=Cas12M08. The lines corresponding to 2.5 DNA-FQ, 0.25 DNA-FQ, and 0.0025 DNA-FQ rise over time. The line corresponding to 2.5 DNA-FQ is the highest, followed by the line corresponding to 0.25 DNA-FQ, and the line corresponding to 0.025 DNA-FQ is the lowest of the three. The remaining lines are minimally distinguishable from the baseline. The bottom right plot shows target=dsDNA, protein=Cas12M08. The lines corresponding to 2.5 DNA-FQ, 0.25 DNA-FQ, and 0.0025 DNA-FQ rise over time. The line corresponding to 2.5 DNA-FQ is the highest, followed by the line corresponding to 0.25 DNA-FQ, and the line corresponding to 0.025 DNA-FQ is the lowest of the three. The remaining lines are minimally distinguishable from the baseline.

[0593] FIG. 50 shows two line plots depicting fluorescence over time. For both plots, the x-axis shows minutes from 0 to 50 in increments of 50, and the y-axis shows raw fluorescence (AU) from 0 to 2,000,000 in increments of 500,000. Both plots depict lines representing the reporters rep01—FAM-U5, rep08—A5, rep09—C5, rep10—G5, rep 11—T5, rep12—TA6, rep13—TA13, rep14—TA10, rep15—T6, rep16—T7, rep19—T10, rep20—T11, rep21—T12, and rep30—beacon. The left plot shows 0 nM, and none of the lines are substantially distinguishable from baseline. The right plot shows 2.5 nM. The line corresponding to rep01—FAM-up rise over time. The remaining lines are not substantially distinguishable from baseline.

[0594] FIG. 54A shows a bar plot depicting fluorescence with different crRNA and primers. The y-axis shows normalized fluorescence from 0 to 160,000 in increments of 20,000. The x-axis shows crRNA. The plot depicts two sets of three bars. The left set depcits on-target crRNA, and the right set depicts off-target crRNA. The three bars in each set correspond to the primers, from left to right, LF+LB, LF, and LB.

[0595] While various embodiments of the present invention have been shown and described herein, it will be apparent to those skilled in the art that such embodiments are provided by way of example only. Numerous variations, changes, and substitutions will now occur to those skilled in the art without departing from the invention. It should be understood that various alternatives to the embodiments of the invention described herein may be employed in practicing the invention. It is intended that the following claims define the scope of the invention and that methods and structures within the scope of these claims and their equivalents be covered thereby.

### Numbered Embodiments

[0596] The following embodiments recite non-limiting permutations of combinations of features disclosed herein. Other permutations of combinations of features are also contemplated. In particular, each of these numbered embodiments is contemplated as depending from or relating to every previous or subsequent numbered embodiment, independent of their order as listed. 1. A microfluidic cartridge for detecting a target nucleic acid comprising: a) an amplification chamber fluidically connected to a valve; b) a detection chamber fluidically connected to the valve, wherein the valve is connected to a sample metering channel; c) a detection reagent chamber fluidically connected to the detection chamber via a resistance channel, the detection reagent chamber comprising a programmable nuclease, a guide nucleic acid, and a labeled detector nucleic acid, wherein the labeled detector nucleic acid is capable of being cleaved upon binding of the guide nucleic acid to a segment of a target nucleic acid. 2. The microfluidic cartridge of embodiment 1, wherein the sample metering channel controls volumes of liquids dispensed in a channel or chamber. 3. The microfluidic cartridge of embodiment 2, wherein the sample metering channel is fluidically connected to the detection chamber. 4. The resistance channel of any one of embodiments 1-3, wherein the resistance channel has a serpentine path, an angular path, or a circuitous path. 5. The microfluidic cartridge of any one of embodiments 1-4, wherein the valve is a rotary valve, pneumatic valve, a hydraulic valve, an elastomeric valve. 6. The microfluidic cartridge of any one of embodiments 1-5, wherein the resistance channel is fluidically connected with the valve. 7. The microfluidic cartridge of any one of embodiments 1-6, wherein the valve comprises casing, comprising a “substrate” or an “over-mold.” 8. The microfluidic cartridge of any one of embodiments 1-7, wherein the valve is actuated by a solenoid. 9. The microfluidic cartridge of any one of embodiments 1-8, wherein the valve is controlled manually, magnetically, electrically, thermally, by a bistable circuit, with a piezoelectric material, electrochemically, with phase change, rehologically, pneumatically, with a check valve, with capillarity, or any combination thereof 10. The microfluidic cartridge of any one of embodiments 5-9, wherein the rotary valve fluidically connects at least 3, at least, 4, or at least 5 chambers. 11. The microfluidic cartridge of any one of embodiments 1-10, further comprising an amplification reagent chamber fluidically connected to the amplification chamber. 12. The microfluidic cartridge of embodiment 11, further comprising a sample chamber fluidically connected to the amplification reagent chamber. 13. The microfluidic cartridge of embodiment 12, further comprising a sample inlet connected to the sample chamber. 14. The microfluidic cartridge of embodiment 13, wherein the sample inlet is sealable. 15. The microfluidic cartridge of embodiment 14, wherein the sample inlet forms a seal around the sample. 16. The microfluidic cartridge of any one of embodiments 12-15, wherein the sample chamber comprises a lysis buffer. 17. The microfluidic cartridge of any one of embodiments 12-16, further comprising a lysis buffer storage chamber fluidically connected to the sample chamber. 18. The microfluidic cartridge of embodiment 17, wherein the lysis buffer storage chamber comprises a lysis buffer. 19. The microfluidic cartridge of any one of embodiments 16-18, wherein the lysis buffer is a dual lysis/amplification buffer. 20. The microfluidic cartridge of any one of embodiments 17-19, wherein the lysis buffer storage chamber is fluidically connected to the sample chamber through a second valve. 21. The microfluidic cartridge of any one of embodiments 12-20, wherein the sample chamber is fluidically connected to the amplification chamber through the amplification reagent chamber. 22. The microfluidic cartridge any one of embodiments 12-20, wherein the sample chamber is fluidically connected to the amplification reagent chamber through the amplification chamber. 23. The microfluidic cartridge of any one of embodiments 11-22, wherein the microfluidic cartridge is configured to direct fluid bidirectionally between the amplification reagent chamber and amplification chamber. 24. The microfluidic cartridge of any one of embodiments 1-23, wherein the detection reagent chamber is fluidically connected to the amplification chamber. 25. The microfluidic cartridge of any one of embodiments 1-24, wherein the amplification chamber is fluidically connected to the detection chamber through the detection reagent chamber. 26. The microfluidic cartridge of any one of embodiments 1-25, further comprising a reagent port above the detection chamber configured to deliver fluid from the detection reagent chamber to the detection chamber. 27. The microfluidic cartridge of any one of embodiments 1-26, wherein the amplification chamber is fluidically connected to the detection reagent chamber through the detection chamber. 28. The microfluidic cartridge of any one of embodiments 1-27, wherein the resistance channel is configured to reduce backflow into the detection chamber and the detection reagent chamber. 29. The microfluidic cartridge of any one of embodiments 2-27, wherein the sample metering channel is configured to direct a predetermined volume of fluid from the detection reagent chamber to the detection chamber. 30. The microfluidic cartridge of any one of embodiments 1-29, wherein the amplification chamber and detection chamber are thermally isolated. 31. The microfluidic cartridge of any one of embodiments 1-30, wherein the detection reagent chamber is fluidically connected to the detection chamber. 32. The microfluidic cartridge of any one of embodiments 1-31, wherein the detection reagent chamber is fluidically connected to the detection chamber via a second resistance channel. 33. The microfluidic cartridge of any one of embodiments 1-32, wherein the resistance channel or the second resistance channel is a serpentine resistance channel. 34. The microfluidic cartridge of any one of embodiments 1-33, wherein the resistance channel or the second resistance channel comprises at least two hairpins. 35. The microfluidic cartridge of any one of embodiments 1-34, wherein the resistance channel or the second resistance channel comprises at least one, at least 2, at least 3, or at least 4 right angles. 36. The microfluidic cartridge of any one of embodiments 1-35, wherein the amplification chamber comprises a sealable sample inlet. 37. The microfluidic cartridge of embodiment 36, wherein the sample inlet is configured to form a seal around a swab. 38. The microfluidic cartridge of any one of embodiments 1-37, wherein microfluidic cartridge is configured to connect to a first pump to pump fluid from the amplification chamber to the detection chamber. 39. The microfluidic cartridge of any one of embodiments 1-38, wherein microfluidic cartridge is configured to connect to a second pump to pump fluid from the detection reagent chamber to the detection chamber. 40. The microfluidic cartridge of any one of embodiments 38-39, wherein first pump or the second pump is a pneumatic pump, a peristaltic pump, a hydraulic pump, or a syringe pump. 41. The microfluidic cartridge of any one of embodiments 1-40, wherein the amplification chamber is fluidically connected to a port configured to receive pneumatic pressure. 42. The microfluidic cartridge of embodiment 41, wherein the amplification chamber is fluidically connected to the port through a channel. 43. The microfluidic cartridge of any one of embodiments 11-42, wherein the amplification reagent chamber is connected to a second port configured to receive pneumatic pressure. 44. The microfluidic cartridge of embodiment 43, wherein the amplification reagent chamber is fluidically connected to the second port through a second channel. 45. The microfluidic cartridge of any one of embodiments 11-44, wherein the microfluidic cartridge is configured to connect to a third pump to pump fluid from the amplification reagent chamber to the amplification chamber. 46. The microfluidic cartridge of embodiment 45, wherein the third pump is a pneumatic pump, a peristaltic pump, a hydraulic pump, or a syringe pump. 47. The microfluidic cartridge of any one of embodiments 1-46, wherein the detection reagent chamber is connected to a port configured to receive pneumatic pressure. 48. The microfluidic cartridge of any one of embodiments 1-47, wherein the detection reagent chamber is fluidically connected to a third port through a third channel. 49. The microfluidic cartridge of any one of embodiments 1-48, wherein the microfluidic cartridge is configured to connect to a fourth pump to pump fluid from the detection reagent chamber to the detection chamber. 50. The microfluidic cartridge of embodiment 49, wherein the fourth pump is a pneumatic pump, a peristaltic pump, a hydraulic pump, or a syringe pump. 51. The microfluidic cartridge of any one of embodiments 1-50, further comprising a plurality of ports configured to couple to a gas manifold, wherein the plurality of ports is configured to receive pneumatic pressure. 52. The microfluidic cartridge of any one of embodiments 1-51, wherein any chamber of the microfluidic cartridge is connected to the plurality of ports of embodiment 50. 53. The microfluidic cartridge of any one of embodiments 1-52, wherein the valve is opened upon application of current electrical signal. 54. The microfluidic cartridge of any one of embodiments 1-53, wherein the detection reagent chamber is circular. 55. The microfluidic cartridge of any one of embodiments 1-53, wherein the detection reagent chamber is elongated. 56. The microfluidic cartridge of any one of embodiments 1-53, wherein the detection reagent chamber is hexagonal. 57. The microfluidic cartridge of any one of embodiments 2-56, wherein a region of the resistance channel is molded to direct flow in a direction perpendicular to the net flow direction. 58. The microfluidic cartridge of any one of embodiments 2-56, wherein a region of the resistance channel is molded to direct flow in a direction perpendicular to the axis defined by two ends of the resistance channel. 59. The microfluidic cartridge of any one of embodiments 2-58, wherein a region of the resistance channel is molded to direct flow along the z-axis of the microfluidic cartridge. 60. The microfluidic cartridge of any one of embodiments 1-59, wherein the valve is fluidically connected to two detection chambers via an amplification mix splitter. 61. The microfluidic cartridge of any one of embodiments 1-60, wherein the valve is fluidically connected to 3, 4, 5, 6, 7, 8, 9, or 10 detection chambers via an amplification mix splitter. 62. The microfluidic cartridge of any one of embodiments 1-61, further comprising a second valve fluidically connected to the detection reagent chamber and the detection chamber. 63. The microfluidic cartridge of any one of embodiments 1-62, wherein the detection chamber is vented with a hydrophobic PTFE vent. 64. The microfluidic cartridge of any one of embodiments 1-63, wherein the detection chamber comprises an optically transparent surface. 65. The microfluidic cartridge of any one of embodiments 1-64, wherein the amplification chamber is configured to hold from 10 μL to 500 μL of fluid. 66. The microfluidic cartridge of any one of embodiments 11-65, wherein the amplification reagent chamber is configured to hold from 10 μL to 500 μL of fluid. 67. The microfluidic cartridge of any one of embodiments 1-66, wherein the microfluidic cartridge is configured to accept from 2 μL to 100 μL of a sample comprising a nucleic acid. 68. The microfluidic cartridge of any one of embodiments 1-67, wherein the amplification reagent chamber comprises between 5 and 200 μl an amplification buffer. 69. The microfluidic cartridge of any one of embodiments 1-68, wherein the amplification chamber comprises 45 μl amplification buffer. 70. The microfluidic cartridge of any one of embodiments 1-69, wherein the detection reagent chamber stores from 5 to 200 μl of fluid containing the programmable nuclease, the guide nucleic acid, and the labeled detector nucleic acid. 71. The microfluidic cartridge of any one of embodiments 1-70, comprising 2, 3, 4, 5, 6, 7, or 8 detection chambers. 72. The microfluidic cartridge of embodiment 71, wherein the 2, 3, 4, 5, 6, 7, or 8 detection chambers are fluidically connected to a single sample chamber. 73. The microfluidic cartridge of any one of embodiments 1-72, wherein the detection chamber holds up to 100 μL, 200 μL, 300 μL, or 400 μL of fluid. 74. The microfluidic cartridge of any one of embodiments 1-73, wherein the microfluidic cartridge comprises 5-7 layers. 75. The microfluidic cartridge of any one of embodiments 1-74, wherein the cartridge comprises layers as shown in FIG. 130B. 76. The microfluidic cartridge of any one of embodiments 1-75, further comprising a sample inlet configured to adapt with a slip luer tip. 77. The microfluidic cartridge of embodiment 76, wherein the slip luer tip is adapted to fit a syringe holding a sample. 78. The microfluidic cartridge of any one of embodiments 76-77, wherein the sample inlet is capable of being hermetically sealed. 79. The microfluidic cartridge of any one of embodiments 1-78, further comprising a sliding valve. 80. The microfluidic cartridge of embodiment 79, wherein the sliding valve connects the amplification reagent chamber to the amplification chamber. 81. The microfluidic cartridge of either of embodiments 79 or 80, wherein the sliding valve connects the amplification chamber to the detection reagent chamber. 82. The microfluidic cartridge of any one of embodiments 79-81, wherein the sliding valve connects the amplification reagent chamber to the detection chamber. 83. A manifold configured to accept the microfluidic cartridge of any one of embodiments 1-82. 84. The manifold of embodiment 83, comprising a pump configured to pump fluid into the detection chamber, an illumination source configured to illuminate the detection chamber, a detector configured to detect a detectable signal produced by the labeled detector nucleic acid, and a heater configured to heat the amplification chamber. 85. The manifold of embodiment 84, further comprising a second heater configured to heat the detection chamber. 86. The manifold of any one of embodiments 84-85, wherein the illumination source is a broad spectrum light source. 87. The manifold of any one of embodiments 84-86, wherein the illumination source light produces an illumination with a bandwidth of less than 5 nm. 88. The manifold of any one of embodiments 84-87, wherein the illumination source is a light emitting diode. 89. The manifold of embodiment 88, wherein the light emitting diode produces white light, blue light, or green light. 90. The manifold of any one of embodiments 84-89, wherein the detectable signal is light. 91. The manifold of any one of embodiments 84-90, wherein the detector is a camera or a photodiode. 92. The manifold of any one of embodiments 84-91, wherein the detector has a detection bandwidth of less than 100 nm, less than 75 nm, less than 50 nm, less than 40 nm, less than 30 nm, less than 20 nm, less than 10 nm, or less than 5 nm. 93. The manifold of any one of embodiments 84-92, further comprising an optical filter configured to be between the detection chamber and the detector. 94. The microfluidic cartridge of any one of embodiments 1-93, wherein the amplification chamber comprises amplification reagents. 95. The microfluidic cartridge of any one of embodiments 11-94, wherein the amplification reagent chamber comprises amplification reagents. 96. The microfluidic cartridge of any one of embodiments 94-95, wherein the amplification reagents comprise a primer, a polymerase, dNTPs, an amplification buffer. 97. The microfluidic cartridge of any one of embodiments 1-96, wherein the amplification chamber comprises a lysis buffer. 98. The microfluidic cartridge of any one of embodiments 11-97, wherein the amplification reagent chamber comprises a lysis buffer. 99. The microfluidic cartridge of any one of embodiments 94-98, wherein the amplification reagents comprise a reverse transcriptase. 100. The microfluidic cartridge of any one of embodiments 94-99, wherein the amplification reagents comprise reagents for thermal cycling amplification. 101. The microfluidic cartridge of any one of embodiments 94-99, wherein the amplification reagents comprise reagents for isothermal amplification. 102. The microfluidic cartridge of any one of embodiments 94-101, wherein the amplification reagents comprise reagents for transcription mediated amplification (TMA), helicase dependent amplification (HDA), circular helicase dependent amplification (cHDA), strand displacement amplification (SDA), loop mediated amplification (LAMP), exponential amplification reaction (EXPAR), rolling circle amplification (RCA), ligase chain reaction (LCR), simple method amplifying RNA targets (SMART), single primer isothermal amplification (SPIA), multiple displacement amplification (MDA), nucleic acid sequence based amplification (NASBA), hinge-initiated primer-dependent amplification of nucleic acids (HIP), nicking enzyme amplification reaction (NEAR), or improved multiple displacement amplification (IMDA). 103. The microfluidic cartridge of any one of embodiments 94-102, wherein the amplification reagents comprise reagents for loop mediated amplification (LAMP). 104. The microfluidic cartridge of any one of embodiments 16-103, wherein the lysis buffer and the amplification buffer are a single buffer. 105. The microfluidic cartridge of any one of embodiments 16-104, wherein the lysis buffer storage chamber comprises a lysis buffer. 106. The microfluidic cartridge of any one of embodiments 16-105, wherein the lysis buffer has a pH of from pH 4 to pH 5. 107. The microfluidic cartridge of any one of embodiments 1-106, wherein the microfluidic cartridge further comprises reverse transcription reagents. 108. The microfluidic cartridge of embodiment 107, wherein the reverse transcription reagents comprise a reverse transcriptase, a primer, and dNTPs. 109. The microfluidic cartridge of any one of embodiments 1-108, wherein the programmable nuclease comprises an RuvC catalytic domain. 110. The microfluidic cartridge of any one of embodiments 1-109, wherein the programmable nuclease is a type V CRISPR/Cas effector protein. 111. The microfluidic cartridge of embodiment 110, wherein the type V CRISPR/Cas effector protein is a Cas12 protein. 112. The microfluidic cartridge of embodiment 111, wherein the Cas12 protein comprises a Cas12a polypeptide, a Cas12b polypeptide, a Cas12c polypeptide, a Cas12d polypeptide, a Cas12e polypeptide, a C2c4 polypeptide, a C2c8 polypeptide, a C2c5 polypeptide, a C2c10 polypeptide, and a C2c9 polypeptide. 113. The microfluidic cartridge of any one of embodiments 110-112, wherein the Cas12 protein has at least 80%, at least 85%, at least 90%, at least 92%, at least 95%, at least 97%, or at least 99% sequence identity to any one of SEQ ID NO: 27-SEQ ID NO: 37. 114. The microfluidic cartridge of any one of embodiments 110-113, wherein the Cas12 protein is selected from SEQ ID NO: 27-SEQ ID NO: 37. 115. The microfluidic cartridge of embodiment 110, wherein the type V CRIPSR/Cas effector protein is a Cas14 protein. 116. The microfluidic cartridge of embodiment 115, wherein the Cas14 protein comprises a Cas14a polypeptide, a Cas14b polypeptide, a Cas14c polypeptide, a Cas14d polypeptide, a Cas14e polypeptide, a Cas 14f polypeptide, a Cas14g polypeptide, a Cas14h polypeptide, a Cas14i polypeptide, a Cas14j polypeptide, or a Cas14k polypeptide. 117. The microfluidic cartridge of any one of embodiments 115-116, wherein the Cas14 protein has at least 80%, at least 85%, at least 90%, at least 92%, at least 95%, at least 97%, or at least 99% sequence identity to any one of SEQ ID NO: 38-SEQ ID NO: 129. 118. The microfluidic cartridge of any one of embodiments 115-117, wherein the Cas14 protein is selected from SEQ ID NO: 38-SEQ ID NO: 129. 119. The microfluidic cartridge of embodiment 110, wherein the type V CRIPSR/Cas effector protein is a CasΦ protein. 120. The microfluidic cartridge of embodiment 119, wherein the CasΦ protein has at least 80%, at least 85%, at least 90%, at least 92%, at least 95%, at least 97%, or at least 99% sequence identity to any one of SEQ ID NO: 274-SEQ ID NO: 321. 121. The microfluidic cartridge of any one of embodiments 119-120, wherein the CasΦ protein is selected from SEQ ID NO: 274-SEQ ID NO: 321. 122. The microfluidic cartridge of any one of embodiments 1-121, the microfluidic cartridge further providing one or more chambers for in vitro transcribing amplified coronavirus target nucleic acid. 123. The microfluidic cartridge of embodiment 122, wherein the in vitro transcribing comprises contacting the amplified coronavirus target nucleic acid to reagents for in vitro transcription. 124. The microfluidic cartridge of embodiment 123, wherein the reagents for in vitro transcription comprise an RNA polymerase, NTPs, and a primer. 125. The microfluidic cartridge of any one of embodiments 1-124, wherein the programable nuclease comprises a HEPN cleaving domain. 126. The microfluidic cartridge of any one of embodiments 1-125, wherein the programmable nuclease is a type VI CRISPR/Cas effector protein. 127. The microfluidic cartridge of embodiment 126, wherein the type VI CRISPR/Cas effector protein is a Cas13 protein. 128. The microfluidic cartridge of embodiment 127, wherein the Cas13 protein comprises a Cas13a polypeptide, a Cas13b polypeptide, a Cas13c polypeptide, a Cas13c polypeptide, a Cas13d polypeptide, or a Cas13e polypeptide. 129. The microfluidic cartridge of any one of embodiments 127-128, wherein the Cas13 protein has at least 80%, at least 85%, at least 90%, at least 92%, at least 95%, at least 97%, or at least 99% sequence identity to any one of SEQ ID NOs: 130-SEQ ID NO: 137. 130. The microfluidic cartridge of any one of embodiments 127-129, wherein the Cas13 protein is selected from SEQ ID NOs: 130-SEQ ID NO: 137. 131. The microfluidic cartridge of any one of embodiments 1-130, wherein the target nucleic acid is from a virus. 132. The microfluidic cartridge of embodiment 131, wherein the virus comprises a respiratory virus. 133. The microfluidic cartridge of embodiment 132, wherein the respiratory virus is an upper respiratory virus. 134. The microfluidic cartridge of embodiment 131, wherein the virus comprises an influenza virus. 135. The microfluidic cartridge of any one of embodiments 131-133, wherein the virus comprises a coronavirus. 136. The microfluidic cartridge of embodiment 135, wherein the coronavirus target nucleic acid is from SARS-CoV-2. 137. The microfluidic cartridge of any one of embodiments 135-136, wherein the coronavirus target nucleic acid is from an N gene, an E gene, or a combination thereof 138. The microfluidic cartridge of any one of embodiments 135-137, wherein the coronavirus target nucleic acid has a sequence of any one of SEQ ID NO: 333-SEQ ID NO: 338. 139. The microfluidic cartridge of any one of embodiments 135-138, wherein the guide nucleic acid is a guide RNA. 140. The microfluidic cartridge of any one of embodiments 135-139, wherein the guide nucleic acid has at least 80%, at least 85%, at least 90%, at least 92%, at least 95%, at least 97%, or at least 99% sequence identify to any one of SEQ ID NO: 323-SEQ ID NO: 328. 141. The microfluidic cartridge of any one of embodiments 135-140, wherein the guide nucleic acid is selected from any one of SEQ ID NO: 323-SEQ ID NO: 328. 142. The microfluidic cartridge of any one of embodiments 1-141, wherein the microfluidic cartridge comprises a control nucleic acid. 143. The microfluidic cartridge of embodiment 142, wherein the control nucleic acid is in the detection chamber. 144. The microfluidic cartridge of any one of embodiments 142-143, wherein the control nucleic acid is RNaseP. 145. The microfluidic cartridge of any one of embodiments 142-144, wherein the control nucleic acid has a sequence of SEQ ID NO: 379. 146. The microfluidic cartridge of any one of embodiments 142-144, wherein the guide nucleic acid has at least 80%, at least 85%, at least 90%, at least 92%, at least 95%, at least 97%, or at least 99% sequence identify to any one of SEQ ID NO: 330-SEQ ID NO: 332. 147. The microfluidic cartridge of any one of embodiments 142-146, wherein the guide nucleic acid is selected from any one of SEQ ID NO: 330-SEQ ID NO: 332. 148. The microfluidic cartridge of any one of embodiments 134-147, wherein the influenza virus comprises an influenza A virus, influenza B virus, or a combination thereof 149. The microfluidic cartridge of embodiment 1-148, wherein the guide nucleic acid targets a plurality of target sequences. 150. The microfluidic cartridge of embodiment 1-149, wherein the system comprises a plurality of guide sequences tiled against a virus. 151. The microfluidic cartridge of embodiment 150, wherein the plurality of target sequences comprises sequences from influenza A virus, influenza B virus, and a third pathogen. 152. The microfluidic cartridge of any one of embodiments 1-151, wherein the labeled detector nucleic acid comprises a single stranded reporter comprising a detection moiety 153. The microfluidic cartridge of embodiment 152, wherein the detection moiety is a fluorophore, a FRET pair, a fluorophore/quencher pair, or an electrochemical reporter molecule. 154. The microfluidic cartridge of embodiment 153, wherein the electrochemical reporter molecule comprises a species shown in FIG. 149. 155. The microfluidic cartridge of any one of embodiments 1-154, wherein the labeled detector produced a detectable signal upon cleavage of the detector nucleic acid. 156. The microfluidic cartridge of embodiment 155, wherein the detectable signal is a colorimetric signal, a fluorescence signal, an amperometric signal, or a potentiometric signal. 157. A method of detecting a target nucleic acid, the method comprising: a) providing a sample from a subject; b) adding the sample to the microfluidic cartridge of any one of embodiments 1-156; c) correlating the detectable signal of any one of embodiments 84-156 to the presence or absence of the target nucleic acid; and d) optionally quantifying the detectable signal, thereby quantifying an amount of the target nucleic acid present in the sample. 158. The use of a microfluidic cartridge according to any one of embodiments 1-156 in a method of detecting a target nucleic acid. 159. The use of a system according to any one of embodiments 1-156 in a method of detecting a targeting nucleic acid. 160. The use of a programmable nuclease in a method of detecting a target nucleic acid according to any one of embodiments 30-63, 66, 150, 153. 161. The use of a composition according to any one of embodiments 66-87 in a method of detecting a target a nucleic acid. 162. The use of a DNA-activated programmable RNA nuclease in a method of assaying for a target deoxyribonucleic acid from a virus in a sample according to any one of embodiments 88, 90-106 or 151. 163. The use of a DNA-activated programmable RNA nuclease in a method of assaying for a target ribonucleic acid from a virus in a sample according to any one of embodiments 88, 90-106, or 152. 164. The use of a programmable nuclease in a method of detecting a target nucleic acid in a sample according to any one embodiments 108-120, 123-148 or 156. 165. A glass capillary comprising dried reagents comprising: a) a programmable nuclease b) a guide nucleic acid c) a labeled detector nucleic acid. wherein the labeled detector nucleic acid is capable of being cleaved upon binding of the guide nucleic acid to a segment of a target nucleic acid. 166. The glass capillary of embodiment 165, wherein the dried reagents can be stored for more than 1 year. 167. The glass capillary of embodiment 165, wherein the dried reagents can be stored up to 7 months, up to 8 months, up to 9 months, up to 10 months, or up to 11 months. 168. The glass capillary of any one of embodiments 165-167, wherein the dried reagents can be stably stored at room temperature. 169. The glass capillary of any one of embodiments 165-168, wherein the dried reagents can be stably stored at 4° C. 170. The glass capillary of any one of embodiments 165-169, wherein a sample comprising the target nucleic acid can be eluted through the capillary. 171. The glass capillary of embodiment 98, wherein the sample rehydrates the dried reagents. 172. The glass capillary of any one of embodiments 165-170, wherein the glass capillary is adapted to a microfluidic cartridge of any one of embodiments 1-156 or the maniforld of any one of embodiments 83-93 for readout of a detectable signal emitted from the cleaved labeled detector nucleic acid, wherein the detectable signal is an optical signal. 173. A method of detecting a target nucleic acid, the method comprising: a) providing a sample from a subject; b) adding the sample to the glass capillary of any one of embodiments 165-172; c) correlating the detectable signal of any one of embodiments 84-173 to the presence or absence of the target nucleic acid; and d) optionally quantifying the detectable signal, thereby quantifying an amount of the target nucleic acid present in the sample. 174. A spin through column comprising a) an upper chamber comprising a programmable nuclease, a guide nucleic acid, a labeled detector nucleic acid wherein the labeled detector nucleic acid is capable of being cleaved upon binding of the guide nucleic acid to a segment of a target nucleic acid and wherein the upper chamber has a first side that is sealed and a second side comprising a filter; and b) a lower chamber comprising reagents for amplification and a sample having the target nucleic acid, wherein the lower chamber is attached to the upper chamber via the second side of the upper chamber. 175. The spin through column of embodiment 174, wherein upon centrifugation, the programmable nuclease, the guide nucleic acid, and the labeled detector nucleic acid flows through to the bottom chamber via the filter. 176. The spin through column of any one of embodiments 174-175, wherein the lower chamber can be imaged for a detectable signal from the cleaved labeled detector nucleic acid. 177. The spin through column of any one of embodiments 174-176, wherein the spin through column is capable of being hermetically sealed. 178. The spin through column of any one of embodiments 174-177, wherein the upper chamber is thermally isolated from the lower chamber. 179. A method of assaying for a segment of a coronavirus target nucleic acid in a sample, the method comprising: a) contacting the sample to: i) a detector nucleic acid; and ii) a composition comprising a programmable nuclease and a non-naturally occurring guide nucleic acid that hybridizes to a segment of the target nucleic acid, wherein the programmable nuclease the detector nucleic acid upon hybridization of the non-naturally occurring guide nucleic acid to the segment of the coronavirus target nucleic acid; and b) assaying for a change in a signal, wherein the change in the signal is produced by cleavage of the detector nucleic acid. 180. The method of embodiment 179, wherein the coronavirus target nucleic acid is from SARS-CoV-2. 181. The method of embodiment 179, wherein the coronavirus target nucleic acid is from an E gene, an N gene, or a combination thereof 182. The method of embodiment 179, wherein the coronavirus target nucleic acid has a sequence of any one of SEQ ID NO: 333-SEQ ID NO: 338. 183. The method of any one of embodiments 179-182, wherein the guide nucleic acid is a guide RNA. 184. The method of any one of embodiments 179-183, wherein the guide nucleic acid has at least 80%, at least 85%, at least 90%, at least 92%, at least 95%, at least 97%, or at least 99% sequence identify to any one of SEQ ID NO: 323-SEQ ID NO: 332. 185. The method of any one of embodiments 179-184, wherein the guide nucleic acid is selected from any one of SEQ ID NO: 323-SEQ ID NO: 332. 186. The method of any one of embodiments 179-185, the method further comprising amplifying the coronavirus target nucleic acid. 187. The method of embodiment 186, wherein the amplifying the coronavirus target nucleic acid comprises contacting the sample to reagents for amplification. 188. The method of embodiment 187, wherein the contacting the sample to regents for the amplification occurs prior to the contacting the sample to the detector nucleic acid to the detector nucleic acid and the composition. 189. The method of embodiment 187, wherein the contacting the sample to regents for the amplification occurs concurrent to the contacting the sample to the detector nucleic acid to the detector nucleic acid and the composition. 190. The method of any one of embodiments 186-189, wherein the amplifying comprises thermal cycling amplification. 191. The method of any one of embodiments 186-189, wherein the amplifying comprises isothermal amplification. 192. The method of any one of embodiments 186-191, wherein the amplifying comprises transcription mediated amplification (TMA), helicase dependent amplification (HDA), circular helicase dependent amplification (cHDA), strand displacement amplification (SDA), loop mediated amplification (LAMP), exponential amplification reaction (EXPAR), rolling circle amplification (RCA), ligase chain reaction (LCR), simple method amplifying RNA targets (SMART), single primer isothermal amplification (SPIA), multiple displacement amplification (MDA), nucleic acid sequence based amplification (NASBA), hinge-initiated primer-dependent amplification of nucleic acids (HIP), nicking enzyme amplification reaction (NEAR), or improved multiple displacement amplification (IMDA). 193. The method of any one of embodiments 186-192, wherein the amplifying comprises loop mediated amplification (LAMP). 194. The method of any one of embodiments 187-193, wherein the reagents for amplification comprise an amplification primer, a polymerase, and dNTPs. 195. The method of any one of embodiments 187-194, wherein the reagents for amplification comprise a FIP primer, a BIP primer, a LF primer, and a LB primer. 196. The method of any one of embodiments 194-195, wherein the amplification primers are selected from SEQ ID NO: 348-SEQ ID NO: 353 or SEQ ID NO: 356-SEQ ID NO: 359. 197. The method of any one of embodiments 179-196, wherein the method further comprises reverse transcribing the coronavirus target nucleic acid. 198. The method of 197, wherein the reverse transcribing comprises contacting the sample to reagents for reverse transcription. 199. The method of 198, wherein the reagents for reverse transcription comprise a reverse transcriptase, an oligonucleotide primer, and dNTPs 200. The method of any one of embodiments 198-199, wherein the contacting the sample to reagents for reverse transcription occurs prior to the contacting the sample to the detector nucleic acid to the detector nucleic acid and the composition, prior to the contacting the sample to the reagents for amplification, or prior to both. 201. The method of any one of embodiments 198-200, wherein the contacting the sample to reagents for reverse transcription occurs concurrent to the contacting the sample to the detector nucleic acid to the detector nucleic acid and the composition, concurrent to the contacting the sample to the reagents for amplification, or concurrent to both. 202. The method of any one of embodiments 179-201, the method further comprising assaying for a control sequence by contacting a control nucleic acid to a second detector nucleic acid and a composition comprising the programmable nuclease and a non-naturally occurring guide nucleic acid that hybridizes to a segment of the control nucleic acid, wherein the programmable nuclease the detector nucleic acid upon hybridization of the non-naturally occurring guide nucleic acid to the segment of the control nucleic acid. 203. The method of embodiment 202, wherein the control nucleic acid is RNase P. 204. The method of any one of embodiments 202-203, wherein the control nucleic acid has a sequence of SEQ ID NO: 339. 205. The method of any one of embodiments 179-204, wherein the guide nucleic acid has at least 80%, at least 85%, at least 90%, at least 92%, at least 95%, at least 97%, or at least 99% sequence identify to SEQ ID NO: 330-SEQ ID NO: 332. 206. The method of any one of embodiments 179-205, wherein the guide nucleic acid is SEQ ID NO: 330-SEQ ID NO: 332. 207. The method of any one of embodiments 179-206, wherein the method is carried out on a lateral flow strip. 208. The method of embodiment 207, wherein the lateral flow strip comprises a sample pad region, a control line, and a test line. 209. The method of embodiment 208, further comprising adding the sample to the sample pad region. 210. The method of any one of embodiments 208-209, wherein the presence or absence of an uncleaved reporter molecule is detected at the control line and the presence or absence of a cleaved reporter molecule is present at a test line. 211. The method of any one of embodiments 179-210, wherein the method is carried out in a microfluidic cartridge of any one of embodiments 1-81. 212. The method of any one of embodiments 179-211, further comprising lysing the sample. 213. The method of embodiment 212, wherein the lysing the sample comprises contacting the sample to a lysis buffer. 214. The method of embodiment 213, wherein the lysis buffer comprises a buffering agent, a pH of from pH 4 to pH 5, and a reducing agent. 215. The method of embodiment 214, wherein the reducing agent is N-Acetyl Cysteine, Dithiothreitol, or tris(2-carboxyethyl)phosphine. 216. The method of any one of embodiments 214-215, wherein the buffering agent is Tris, phosphate, or HEPES. 217. The method of any one of embodiments 213-216, wherein the lysis buffer further comprises a chelating agent. 218. The method of embodiment 217, wherein the chelating agent is EDTA or EGTA. 219. The method of any one of embodiments 213-218, wherein the lysis buffer further comprises magnesium salt. 220. The method of embodiment 219, wherein the magnesium salt is magnesium sulfate, magnesium chloride, or magnesium acetate. 221. The method of any one of embodiments 179-220, wherein the programmable nuclease comprises an RuvC catalytic domain. 222. The method of any one of embodiments 179-221, wherein the programmable nuclease is a type V CRISPR/Cas effector protein. 223. The method of embodiment 222, wherein the type V CRISPR/Cas effector protein is a Cas12 protein. 224. The method of embodiment 223, wherein the Cas12 protein comprises a Cas12a polypeptide, a Cas12b polypeptide, a Cas12c polypeptide, a Cas12d polypeptide, a Cas12e polypeptide, a C2c4 polypeptide, a C2c8 polypeptide, a C2c5 polypeptide, a C2c10 polypeptide, and a C2c9 polypeptide. 225. The method of any one of embodiments 223-224, wherein the Cas12 protein has at least 80%, at least 85%, at least 90%, at least 92%, at least 95%, at least 97%, or at least 99% sequence identity to any one of SEQ ID NO: 27-SEQ ID NO: 37. 226. The method of any one of embodiments 223-225, wherein the Cas12 protein is selected from SEQ ID NO: 27-SEQ ID NO: 37. 227. The method of embodiment 222, wherein the type V CRIPSR/Cas effector protein is a Cas14 protein. 228. The method of embodiment 227, wherein the Cas14 protein comprises a Cas14a polypeptide, a Cas14b polypeptide, a Cas14c polypeptide, a Cas14d polypeptide, a Cas14e polypeptide, a Cas14f polypeptide, a Cas14g polypeptide, a Cas14h polypeptide, a Cas14i polypeptide, a Cas14j polypeptide, or a Cas14k polypeptide. 229. The method of any one of embodiments 227-228, wherein the Cas14 protein has at least 80%, at least 85%, at least 90%, at least 92%, at least 95%, at least 97%, or at least 99% sequence identity to any one of SEQ ID NO: 38-SEQ ID NO: 129. 230. The method of any one of embodiments 227-229, wherein the Cas14 protein is selected from SEQ ID NO: 38-SEQ ID NO: 129. 231. The method of embodiment 222, wherein the type V CRIPSR/Cas effector protein is a Case protein. 232. The method of embodiment 231, wherein the Case protein has at least 80%, at least 85%, at least 90%, at least 92%, at least 95%, at least 97%, or at least 99% sequence identity to any one of SEQ ID NO: 274-SEQ ID NO: 321. 233. The method of any one of embodiments 231-232, wherein the CasΦ protein is selected from SEQ ID NO: 274-SEQ ID NO: 321. 234. The method of any one of embodiments 179-233, the method further comprising in vitro transcribing amplified coronavirus target nucleic acid. 235. The method of embodiment 234, wherein the in vitro transcribing comprises contacting the amplified coronavirus target nucleic acid to reagents for in vitro transcription. 236. The method of embodiment 235, wherein the reagents for in vitro transcription comprise an RNA polymerase, a primer, and NTPs. 237. The method of any one of embodiments 179-236, wherein the programable nuclease comprises a HEPN cleaving domain. 238. The method of any one of embodiments 179-237, wherein the programmable nuclease is a type VI CRISPR/Cas effector protein. 239. The method of embodiment 238, wherein the type VI CRISPR/Cas effector protein is a Cas13 protein. 240. The method of embodiment 239, wherein the Cas13 protein comprises a Cas13a polypeptide, a Cas13b polypeptide, a Cas13c polypeptide, a Cas13c polypeptide, a Cas13d polypeptide, or a Cas13e polypeptide. 241. The method of any one of embodiments 239-240, wherein the Cas13 protein has at least 80%, at least 85%, at least 90%, at least 92%, at least 95%, at least 97%, or at least 99% sequence identity to any one of SEQ ID NOs: 130-SEQ ID NO: 147. 242. The method of any one of embodiments 239-241, wherein the Cas13 protein is selected from SEQ ID NOs: 130-SEQ ID NO: 147. 243. The method of any one of embodiments 179-242, further comprising multiplexed detection of more than one coronavirus target nucleic acid. 244. The method of any one of embodiments 179-243, further comprising multiplexed detection of more than one coronavirus target nucleic acid and a control nucleic acid. 245. The method of any one of embodiments 243-244, wherein the multiplexed detection is carried out in a test tube, a well plate, a lateral flow strip, or a microfluidic cartridge. 246. The method of any one of embodiments 179-245, wherein sample lysis, reverse transcription, amplification, in vitro transcription, detection, or any combination thereof is carried out in a single volume. 247. The method of any one of embodiments 179-246, wherein sample lysis, reverse transcription, amplification, in vitro transcription, detection, or any combination thereof is carried out in separate volumes. 248. A composition comprising a non-naturally occurring guide nucleic acid having at least 80%, at least 85%, at least 90%, at least 92%, at least 95%, at least 97%, or at least 99% sequence identify to any one of SEQ ID NO: 323-SEQ ID NO: 332. 249. The composition of embodiment 248, wherein the guide nucleic acid is selected from any one of SEQ ID NO: 323-SEQ ID NO: 332. 250. The composition of any one of embodiments 248-249, the composition further comprising the detector nucleic acid of any one of embodiments 179-247. 251. The composition of any one of embodiments 248-250, the composition further comprising the programmable nuclease of any one of embodiments 179-247. 252. The composition of any one of embodiments 248-251, the composition further comprising the reagents for amplification of any one of embodiments 187-247. 253. The composition of any one of embodiments 248-252, the composition further comprising the reagents for reverse transcription of any one of embodiments 200-247. 254. The composition of any one of embodiments 248-253, the composition further comprising the reagents for in vitro transcription of any one of embodiments 135-254. 255. The composition of any one of embodiments 248-254, the composition further comprising the lysis buffer of any one of embodiments 213-247. 256. The composition of any one of embodiments 248-255, the composition further comprising the control nucleic acid of any one of embodiments 244-247. 257. The composition of any one of embodiments 248-256, the composition further comprising the guide nucleic acid of any one of embodiments 202-247. 258. The composition of any one of embodiments 248-257, wherein the composition is present in a lateral flow strip of any one of embodiments 245-247. 259. The composition of any one of embodiments 248-258, wherein the composition is present in a microfluidic cartridge of any one of embodiments 1-156. 260. The use of a programmable nuclease in a method of assaying for a segment of a coronavirus target nucleic acid in sample according to any one of embodiments 179-247. 261. The use of a composition according to any one of embodiments 248-268 in a method of detecting a target nucleic acid.

[0597] The following embodiments recite non-limiting permutations of combinations of features disclosed herein. Other permutations of combinations of features are also contemplated. In particular, each of these numbered embodiments is contemplated as depending from or relating to every previous or subsequent numbered embodiment, independent of their order as listed. 1. A system for detecting a target nucleic acid, said system comprising: a guide nucleic acid targeting a target sequence from a virus; a programmable nuclease capable of being activated when complexed with the guide nucleic acid and the target sequence; and a reporter, wherein the reporter is capable of being cleaved by the activated nuclease, thereby generating a detectable signal. 2. The system of embodiment 1, wherein the reporter comprises a single stranded reporter comprising a detection moiety. 3. The system of embodiment 1, wherein the virus comprises an influenza virus or a coronavirus. 4. The system of embodiment 3, wherein the influenza virus comprises an influenza A virus, influenza B virus, or a combination thereof 5. The system of embodiment 1, wherein the virus comprises a respiratory virus. 6. The system of embodiment 5, wherein the respiratory virus is an upper respiratory virus. 7. The system of embodiment 1, wherein the guide nucleic acid targets a plurality of target sequences. 8. The system of embodiment 1, wherein the system comprises a plurality of guide sequences tiled against the virus. 9. The system of embodiment 7, wherein the plurality of target sequences comprises sequences from influenza A virus, influenza B virus, and a third pathogen. 10. The system of embodiment 2, wherein the single stranded reporter comprises a detection moiety at the 5′ end. 11. The system of embodiment 2, wherein the single stranded reporter comprises a biotin-dT/FAM moiety or a biotin-dT/ROX moiety. 12. The system of embodiment 2, wherein the single stranded reporter comprises a chemical functional handle at the 3′end capable of being conjugated to a substrate. 13. The system of embodiment 12, wherein the substrate is a magnetic bead. 14. The system of embodiment 12, wherein the substrate is a surface of a reaction chamber. 15. The system of embodiment 14, wherein downstream of the reaction chamber is a test line. 16. The system of embodiment 15, wherein the test line comprises a streptavidin. 17. The system of embodiment 15, wherein downstream of the test line is a flow control line. 18. The system of embodiment 17, wherein the flow control line comprises an anti-IgG antibody. 19. The system of embodiment 18, wherein the anti-IgG antibody comprises an anti-rabbit IgG antibody. 20. The system of embodiment 11, wherein the activated nuclease is capable of cleaving the single stranded reporter and releases the biotin-dT/FAM moiety or the biotin-dT/ROX moiety. 21. The system of embodiment 20, wherein the biotin-dT/FAM moiety is capable of binding the streptavidin at the test line. 22. The system of embodiment 1, wherein the reporter is an electroactive reporter. 23. The system of embodiment 22, wherein the electroactive reporter comprises biotin and methylene blue. 24. The system of embodiment 1, wherein the reporter is an enzyme-nucleic acid. 25. The system of embodiment 24, wherein the enzyme-nucleic acid is an invertase enzyme. 26. The system of embodiment 24, wherein an enzyme of the enzyme-nucleic acid is a sterically hindered enzyme. 27. The system of embodiment 24, wherein upon cleavage of a nucleic acid of the enzyme-nucleic acid, the enzyme is functional. 28. The system of embodiment 1, wherein the detectable signal is a colorimetric signal, a fluorescence signal, an amperometric signal, or a potentiometric signal. 29. A method of detecting a target nucleic acid in a sample comprising: contacting the sample with a guide nucleic acid targeting a target sequence; a programmable nuclease capable of being activated when complexed with the guide nucleic acid and the target sequence; and a reporter, wherein the reporter is capable of being cleaved by the activated nuclease, thereby generating a detectable signal. 30. The method of embodiment 29, wherein the target nucleic acid is from an exogenous pathogen. 31. The method of embodiment 30, wherein the exogenous pathogen comprises a virus. 32. The method of embodiment 31, wherein the virus comprises an influenza virus or a coronavirus. 33. The method of embodiment 32, wherein the influenza virus comprises an influenza A virus, influenza B virus, or a combination thereof 34. The method of embodiment 31, wherein the virus comprises a respiratory virus. 35. The method of embodiment 34, wherein the respiratory virus is an upper respiratory virus. 36. The method of embodiment 31, wherein the detectable signal indicates presence of the virus in the sample. 37. The method of embodiment 31, wherein the method further comprises diagnosing a subject from which the sample was taken with the virus. 38. The method of embodiment 37, wherein the subject is a human. 39. The method of embodiment 29, wherein the sample is a buccal swab, a nasal swab, or urine. 40. The method of embodiment 29, wherein the reporter comprises a single stranded reporter comprising a detection moiety. 41. The method of embodiment 29, wherein the guide nucleic acid targets a plurality of target sequences. 42. The system of embodiment 31, wherein the method comprises tiling a plurality of guide sequences against the virus. 43. The method of embodiment 42, wherein the plurality of target sequences comprises sequences from influenza A virus, influenza B virus, and a third pathogen. 44. The method of embodiment 40, wherein the single stranded reporter comprises a detection moiety at the 5′ end. 45. The method of embodiment 40, wherein the single stranded reporter comprises a biotin-dT/FAM moiety or a biotin-dT/ROX moiety. 46. The method of embodiment 40, wherein the single stranded reporter comprises a chemical functional handle at the 3′ end capable of being conjugated to a substrate. 47. The method of embodiment 46, wherein the substrate is a magnetic bead. 48. The method of embodiment 46, wherein the substrate is a surface of a reaction chamber. 49. The method of embodiment 48, wherein downstream of the reaction chamber is a test line. 50. The method of embodiment 49, wherein the test line comprises a streptavidin. 51. The method of embodiment 49, wherein downstream of the test line is a flow control line. 52. The method of embodiment 51, wherein the flow control line comprises an anti-IgG antibody. 53. The method of embodiment 52, wherein the anti-IgG antibody comprises an anti-rabbit IgG antibody. 54. The method of embodiment 45, wherein the activated nuclease is capable of cleaving the single stranded reporter and releases the biotin-dT/FAM moiety or the biotin-dT/ROX moiety. 55. The method of embodiment 54, wherein the biotin-dT/FAM moiety is capable of binding the streptavidin at the test line. 56. The method of embodiment 29, wherein the reporter is an electroactive reporter. 57. The method of embodiment 56, wherein the electroactive reporter comprises biotin and methylene blue. 58. The method of embodiment 29, wherein the reporter is an enzyme-nucleic acid. 59. The method of embodiment 58, wherein the enzyme-nucleic acid is an invertase enzyme. 60. The method of embodiment 58, wherein an enzyme of the enzyme-nucleic acid is a sterically hindered enzyme. 61. The method of embodiment 58, wherein upon cleavage of a nucleic acid of the enzyme-nucleic acid, the enzyme is functional. 62. The method of embodiment 29, wherein the detectable signal is a colorimetric signal, a fluorescence signal, an amperometric signal, or a potentiometric signal. 63. The system of embodiment 5, wherein the respiratory virus is a lower respiratory virus. 64. The method of embodiment 34, wherein the respiratory virus is a lower respiratory virus. 65. A composition comprising: a) a DNA-activated programmable RNA nuclease; and b) a guide nucleic acid comprising a segment that is reverse complementary to a segment of a target deoxyribonucleic acid, wherein the DNA-activated programmable RNA nuclease binds to the guide nucleic acid to form a complex. 66. The composition of embodiment 65, further comprising an RNA reporter. 67. The composition of any one of embodiments 65 and 66, further comprising the target deoxyribonucleic acid from a virus. 68. The composition of any one of embodiments 65-67, wherein the target deoxyribonucleic acid is an amplicon of a nucleic acid. 69. The composition of embodiment 68, wherein the nucleic acid is a deoxyribonucleic acid or a ribonucleic acid. 70. The composition of any one of embodiments 65-69, wherein the DNA-activated programmable RNA nuclease is a Type VI CRISPR/Cas enzyme. 71. The composition of any one of embodiments 65-70, wherein the DNA-activated programmable RNA nuclease is a Cas13. 72. The composition of any one of embodiments 65-71, wherein the DNA-activated programmable RNA nuclease is a Cas13a. 73. The composition of embodiment 72, wherein the Cas13a is LbuCas13a or LwaCas13a. 74. The composition of any one of embodiments 65-73, wherein the composition has a pH from pH 6.8 to pH 8.2. 75. The composition of any one of embodiments 65-74, wherein the target deoxyribonucleic acid lacks a guanine at the 3′ end. 76. The composition of any one of embodiments 65-75, wherein the target deoxyribonucleic acid is a single-stranded deoxyribonucleic acid. 77. The composition of any one of embodiments 65-76, further comprising a support medium. 78. The composition of any one of embodiments 65-77, further comprising a lateral flow assay device. 79. The composition of any one of embodiments 65-78, further comprising a device configured for fluorescence detection. 80. The composition of any one of embodiments 65-79, further comprising a second guide nucleic acid and a DNA-activated programmable DNA nuclease, wherein the second guide nucleic acid comprises a segment that is reverse complementary to a segment of a second target deoxyribonucleic acid comprising a guide nucleic acid. 81. The composition of embodiment 80, further comprising a DNA reporter. 82. The composition of any one of embodiments 80 and 81, wherein the DNA-activated programmable DNA nuclease is a Type V CRISPR/Cas enzyme. 83. The composition of any one of embodiments 81-82, wherein the DNA-activated programmable DNA nuclease is a Cas12. 84. The composition of embodiment 83, wherein the Cas12 is a Cas12a, Cas12b, Cas12c, Cas12d, or Cas12e. 85. The composition of any one of embodiments 80-82, wherein the DNA-activated programmable DNA nuclease is a Cas14. 86. The composition of embodiment 85, wherein the Cas14 is a Cas14a, Cas14b, Cas14c, Cas14d, Cas14e, Cas 14f, Cas14g, or Cas14h. 87. The composition of embodiment 82, wherein the type V CRIPSR/Cas effector protein is a Case protein. 88. The composition of embodiment 87, wherein the Case protein has at least 80%, at least 85%, at least 90%, at least 92%, at least 95%, at least 97%, or at least 99% sequence identity to any one of SEQ ID NO: 274-SEQ ID NO: 321. 89. The composition of any one of embodiments 87-88, wherein the Case protein is selected from SEQ ID NO: 274-SEQ ID NO: 321. 90. A method of assaying for a target deoxyribonucleic acid from a virus in a sample, the method comprising: contacting the sample to a complex comprising a guide nucleic acid and a DNA-activated programmable RNA nuclease, wherein the guide nucleic acid comprises a segment that is reverse complementary to a segment of the target deoxyribonucleic acid, and assaying for a signal produced by cleavage of at least some RNA reporters of a plurality of RNA reporters. 91. A method of assaying for a target ribonucleic acid from a virus in a sample, the method comprising: amplifying a nucleic acid in a sample to produce a target deoxyribonucleic acid; contacting the target deoxyribonucleic acid to a complex comprising a guide nucleic acid and a DNA-activated programmable RNA nuclease, wherein the guide nucleic acid comprises a segment that is reverse complementary to a segment of the target deoxyribonucleic acid, and assaying for a signal produced by cleavage of at least some RNA reporters of a plurality of RNA reporters. 92. The method of any one of embodiments 90 or 91, wherein the DNA-activated programmable RNA nuclease is a Type VI CRISPR nuclease. 93. The method of any one of embodiments 90-92, wherein the DNA-activated programmable RNA nuclease is a Cas13. 94. The method of embodiment 93, wherein the Cas13 is a Cas13a. 95. The method of embodiment 94, wherein the Cas13a is LbuCas13a or LwaCas13a. 96. The method of any one of embodiments 90-95, wherein cleavage of the at least some RNA reporters of the plurality of reporters occurs from pH 6.8 to pH 8.2. 97. The method of any one of embodiments 90-96, wherein the target deoxyribonucleic acid lacks a guanine at the 3′ end. 98. The method of any one of embodiments 90-97, wherein the target deoxyribonucleic acid is a single-stranded deoxyribonucleic acid. 99. The method of any one of embodiments 90-98, wherein the target deoxyribonucleic acid is an amplicon of a ribonucleic acid. 100. The method of any one of embodiments 90-99, wherein the target deoxyribonucleic acid or the ribonucleic acid is from an organism. 101. The method of embodiment 100, wherein the organism is a virus, bacteria, plant, or animal. 102. The method of any one of embodiments 90-101, wherein the target deoxyribonucleic acid is produced by a nucleic acid amplification method. 103. The method of embodiment 102, wherein the nucleic acid amplification method is isothermal amplification. 104. The method of embodiment 102, wherein the nucleic acid amplification method is thermal amplification. 105. The method of embodiment 102, wherein the nucleic acid amplification method is recombinase polymerase amplification (RPA), transcription mediated amplification (TMA), strand displacement amplification (SDA), helicase dependent amplification (HDA), loop mediated amplification (LAMP), rolling circle amplification (RCA), single primer isothermal amplification (SPIA), ligase chain reaction (LCR), simple method amplifying RNA targets (SMART), or improved multiple displacement amplification (IMDA), or nucleic acid sequence-based amplification (NASBA). 106. The method of any one of embodiments 90-105, wherein the signal is fluorescence, luminescence, colorimetric, electrochemical, enzymatic, calorimetric, optical, amperometric, or potentiometric. 107. The method of any one of embodiments 90-106, further comprising contacting the sample to a second guide nucleic acid and a DNA-activated programmable DNA nuclease, wherein the second guide nucleic acid comprises a segment that is reverse complementary to a segment of a second target deoxyribonucleic acid comprising a guide nucleic acid. 108. The method of embodiment 39, further comprising assaying for a signal produced by cleavage of at least some DNA reporters of a plurality of DNA reporters. 109. The method of any one of embodiments 107 and 108, wherein the DNA-activated programmable DNA nuclease is a Type V CRISPR nuclease. 110. The method of any one of embodiments 107-109, wherein the DNA-activated programmable DNA nuclease is a Cas12. 111. The method of embodiment 110, wherein the Cas12 is a Cas12a, Cas12b, Cas12c, Cas12d, or Cas12e. 112. The method of embodiments 107-109, wherein the DNA-activated programmable DNA nuclease is a Cas14. 113. The method of embodiment 112, wherein the Cas14 is a Cas14a, Cas14b, Cas14c, Cas14d, Cas14e, Cas14f, Cas14g, or Cas14h. 114. The method of embodiment 107-109, wherein the DNA-activated programmable DNA nuclease is a Case protein. 115. The method of embodiment 114, wherein the Case protein has at least 80%, at least 85%, at least 90%, at least 92%, at least 95%, at least 97%, or at least 99% sequence identity to any one of SEQ ID NO: 274-SEQ ID NO: 321. 116. The method of any one of embodiments 114-115, wherein the CasΦ protein is selected from SEQ ID NO: 274-SEQ ID NO: 321. 117. The method of any one of embodiments 90-116, wherein the guide nucleic acid comprises a crRNA. 118. The method of any one of embodiments 90-117, wherein the guide nucleic acid comprises a crRNA and a tracrRNA. 119. The method of any one of embodiments 90-118, wherein the signal is present prior to cleavage of the at least some RNA reporters. 120. The method of any one of embodiments 90-119, wherein the signal is absent prior to cleavage of the at least some RNA reporters. 121. The method of any one of embodiments 90-120, wherein the sample comprises blood, serum, plasma, saliva, urine, mucosal sample, peritoneal sample, cerebrospinal fluid, gastric secretions, nasal secretions, sputum, pharyngeal exudates, urethral or vaginal secretions, an exudate, an effusion, or tissue. 122. The method of any one of embodiments 90-121, wherein the method is carried out on a support medium. 123. The method of any one of embodiments 90-122, wherein the method is carried out on a lateral flow assay device. 124. The method of any one of embodiments 90-123, wherein the method is carried out on a device configured for fluorescence detection. 125. A method of designing a plurality of primers for amplification of a target nucleic acid, the method comprising: providing a target nucleic acid, wherein a guide nucleic acid hybridizes to the target nucleic acid and wherein at least 60% of a sequence of the target nucleic acid is between an F1c region and a B1 region or between an F1 and a B1c region; and designing the plurality of primers comprising: i) a forward inner primer comprising a sequence of the F1c region 5′ of a sequence of an F2 region; ii) a backward inner primer comprising a sequence of the B1c region 5′ of a sequence of a B2 region; iii) a forward outer primer comprising a sequence of an F3 region; and iv) a backward outer primer comprising a sequence of a B3 region. 126. A method of detecting a target nucleic acid in a sample, the method comprising: contacting the sample to: a plurality of primers comprising: i) a forward inner primer comprising a sequence corresponding to an F1c region 5′ of a sequence corresponding to an F2 region; ii) a backward inner primer comprising a sequence corresponding to a B1 c region 5′ of a sequence corresponding to a B2 region; iii) a forward outer primer comprising a sequence corresponding to an F3 region; and iv) a backward outer primer comprising a sequence corresponding to a B3 region; a guide nucleic acid, wherein the guide nucleic acid hybridizes to the target nucleic acid and wherein at least 60% of a sequence of the target nucleic acid is between the F1c region and a B1 region or between an F1 region and the B1c region; a reporter; and a programmable nuclease that cleaves the reporter when complexed with the guide nucleic acid; and measuring a detectable signal produced by cleavage of the reporter, wherein the measuring provides for detection of the target nucleic acid in the sample. 127. The method of any one of embodiments 125-126, wherein the sequence between the F1c region and the B1 region or the sequence between the B1c region and the F1 region is at least 50% reverse complementary to the guide nucleic acid sequence. 128. The method of any one of embodiments 125-127, wherein the guide nucleic acid sequence is reverse complementary to no more than 50% of the forward inner primer, the backward inner primer, or a combination thereof 129. The method of any one of embodiments 125-128, wherein the guide nucleic acid does not hybridize to the forward inner primer and the backward inner primer. 130. The method of any one of embodiments 125-129, wherein a protospacer adjacent motif (PAM) or a protospacer flanking site (PFS) is 3′ of the target nucleic acid. 131. The method of any one of embodiments 125-130, wherein a protospacer adjacent motif (PAM) or a protospacer flanking site (PFS) is 3′ of the B1 region and 5′ of the F1c region or the protospacer adjacent motif (PAM) or a protospacer flanking site (PFS) is 3′ of the F1 region and 5′ of the B1c region. 132. The method of any one of claims 125-131, wherein the 3′ end of the target nucleic acid is 5′ of the 5′ end of the F3c region or the 3′ end of the target nucleic acid is 5′ of the 5′ end of the B3c region. 133. The method of any one of embodiments 125-132, wherein the 3′ end of the target nucleic acid is 5′ of the 5′ end of the F2c region or 3′ end of the target nucleic acid is 5′ of the 5′ end of the B2c region. 134. The method of any one of embodiments 125-133, wherein the target nucleic acid is between the F1c region and the B1 region and the 3′ end of the target nucleic acid is 5′ of the 3′ end of the F2c region, or wherein the target nucleic acid is between the B1c region and the F1 region and the 3′ end of the target nucleic acid is 5′ of the 3′ end of the B2c region. 135. The method of any one of embodiments 125-134, wherein the guide nucleic acid has a sequence reverse complementary to no more than 50% of the forward inner primer, the backward inner primer, the forward outer primer, the backward outer primer, or any combination thereof 136. The method of any one of embodiments 125-135, wherein the guide nucleic acid sequence does not hybridize to the forward inner primer, the backward inner primer, the forward outer primer, the backward outer primer, or any combination thereof 137. The method of any one of embodiments 125-136, wherein the guide nucleic acid sequence has a sequence reverse complementary to no more than 50% of a sequence of an F3c region, an F2c region, the F1c region, the B1c region, an B2c region, an B3c region, or any combination thereof 138. The method of any one of embodiments 125-137, wherein the guide nucleic acid sequence does not hybridize to a sequence of an F3c region, an F2c region, the F1c region, the B1c region, an B2c region, an B3c region, or any combination thereof 139. A method of designing a plurality of primer for amplification of a target nucleic acid, the method comprising: providing the target nucleic acid comprising a sequence between a B2 region and a B1 region or between an F2 region and an F1 region that hybridizes to a guide nucleic acid; and designing the plurality of primers comprising: i) a forward inner primer comprising a sequence of the F1c region 5′ of a sequence of an F2 region; ii) a backward inner primer comprising a sequence of the B1c region 5′ of a sequence of a B2 region; iii) a forward outer primer comprising a sequence of an F3 region; and iv) a backward outer primer comprising a sequence of a B3 region. 140. A method of designing a plurality of primer for amplification of a target nucleic acid, the method comprising: providing the target nucleic acid comprising a sequence between a F1c region and an F2c region or between a B1c region and a B2c region that hybridizes to a guide nucleic acid; and designing the plurality of primers comprising: i) a forward inner primer comprising a sequence of the F1c region 5′ of a sequence of an F2 region; ii) a backward inner primer comprising a sequence of the B1c region 5′ of a sequence of a B2 region; iii) a forward outer primer comprising a sequence of an F3 region; and iv) a backward outer primer comprising a sequence of a B3 region. 141. A method of detecting a target nucleic acid in a sample, the method comprising: contacting the sample to: a plurality of primers comprising: i) a forward inner primer comprising a sequence corresponding to an F 1 c region 5′ of a sequence corresponding to an F2 region; ii) a backward inner primer comprising a sequence corresponding to a B1c region 5′ of a sequence corresponding to a B2 region; iii) a forward outer primer comprising a sequence corresponding to an F3 region; and iv) a backward outer primer comprising a sequence corresponding to a B3 region; a guide nucleic acid, wherein the target nucleic acid comprises a sequence between a B2 region and a B1 region or between the F2 region and an F1 region that hybridizes to the guide nucleic acid; a reporter; and a programmable nuclease that cleaves the reporter when complexed with the guide nucleic acid; and measuring a detectable signal produced by cleavage of the reporter, wherein the measuring provides for detection of the target nucleic acid in the sample. 142. A method of detecting a target nucleic acid in a sample, the method comprising: contacting the sample to: a plurality of primers comprising: i) a forward inner primer comprising a sequence corresponding to an F1c region 5′ of a sequence corresponding to an F2 region; ii) a backward inner primer comprising a sequence corresponding to a B1c region 5′ of a sequence corresponding to a B2 region; iii) a forward outer primer comprising a sequence corresponding to an F3 region; and iv) a backward outer primer comprising a sequence corresponding to a B3 region; a guide nucleic acid, wherein the target nucleic acid comprises a sequence between the F1c region and an F2c region or between the B1c region and a B2c region that hybridizes to the guide nucleic acid; a reporter; and a programmable nuclease that cleaves the reporter when complexed with the guide nucleic acid; and measuring a detectable signal produced by cleavage of the reporter, wherein the measuring provides for detection of the target nucleic acid in the sample. 143. The method of any one embodiment 139 or embodiment 141, wherein a protospacer adjacent motif (PAM) or a protospacer flanking site (PFS) is 3′ of the B2 region and 5′ of the B1 region or the protospacer adjacent motif (PAM) or a protospacer flanking site (PFS) is 3′ of the F2 region and 5′ of the Fl region. 144. The method of any one embodiment 140 or embodiment 142, wherein a protospacer adjacent motif (PAM) or a protospacer flanking site (PFS) is 3′ of the B1c region and 5′ of the B2c region or the protospacer adjacent motif (PAM) or a protospacer flanking site (PFS) is 3′ of the F1c region and 5′ of the F2c region. 145. The method of any one of embodiments 139-144, wherein a protospacer adjacent motif (PAM) or a protospacer flanking site (PFS) is 3′ of the target nucleic acid. 146. The method of embodiment 145, wherein the PAM and the PFS are 5′ of the 5′ end of the F1c region, 5′ of the 5′ end of the B1c region, 3′ of the 3′ end of the F3 region, 3′ of the 3′ end of the B3 region, 3′ of the 3′ end of the F2 region, 3′ of the 3′ end of the B2 region, or any combination thereof 147. The method of embodiment 146, wherein the PAM and the PFS do not overlap the F2 region, the B3 region, the F1c region, the F2 region, the B1c region, the B2 region, or any combination thereof 148. The method of any one of embodiments 145-147, wherein the PAM and the PFS do not hybridize to the forward inner primer, the backward inner primer, the forward outer primer, the backward outer primer, or any combination thereof 149. The method of any one of embodiments 125-148, wherein the plurality of primers further comprises a loop forward primer. 150. The method of any one of embodiments 125-149, wherein the plurality of primers further comprises a loop backward primer. 151. The method of any one of embodiments 149-150, wherein the loop forward primer is between an F lc region and an F2c region. 152. The method of any one of embodiments 150-151, wherein the loop backward primer is between a B1 c region and a B2c region. 153. The method of any one of embodiments 125-152, wherein the target nucleic acid comprises a single nucleotide polymorphism (SNP). 154. The method of embodiment 153, wherein the single nucleotide polymorphism (SNP) comprises a HERC2 SNP. 155. The method of embodiment 153, wherein the single nucleotide polymorphism (SNP) is associated with an increased risk or decreased risk of cancer. 156. The method of any one of embodiments 126-138 or 141-155, wherein the target nucleic acid comprises a single nucleotide polymorphism (SNP), and wherein the detectable signal is higher in the presence of a guide nucleic acid that is 100% complementary to the target nucleic acid comprising the single nucleotide polymorphism (SNP) than in the presence of a guide nucleic acid that is less than 100% complementary to the target nucleic acid comprising the single nucleotide polymorphism (SNP). 157. The method of any one of embodiments 125-156, wherein the plurality of primers and the guide nucleic acid are present together in a sample comprising the target nucleic acid. 158. The method of any one of embodiments 126-138 or 141-157, wherein the contacting the sample to the plurality of primers results in amplifying the target nucleic acid. 159. The method of embodiment 158, wherein the amplifying and the contacting the sample to the guide nucleic acid occurs at the same time. 160. The method of embodiment 158, wherein the amplifying and the contacting the sample to the guide nucleic acid occur at different times. 161. The method of any one of embodiments 126-138 or 141-160, wherein the method further comprises providing a polymerase, a dATP, a dTTP, a dGTP, a dCTP, or any combination thereof 162. The method of any one of embodiments 125-161, wherein the target nucleic acid is from a virus. 163. The method of embodiment 162, wherein the virus comprises an influenza virus, respiratory syncytial virus, coronavirus, or a combination thereof 164. The method of embodiment 163, wherein the influenza virus comprises an influenza A virus, influenza B virus, or a combination thereof 165. The method of any one of embodiments 162-164, wherein the virus comprises a respiratory virus. 166. The method of embodiment 165, wherein the respiratory virus is an upper respiratory virus. 167. The system of any one of embodiments 1-28, wherein the system further comprises a forward inner primer, a backward inner primer, a forward outer primer, a backward outer primer, a loop forward primer, a loop backward primer, or any combination thereof 168. The method of any one of embodiments 29-64, the method further comprising contacting the sample with a forward inner primer, a backward inner primer, a forward outer primer, a backward outer primer, a loop forward primer, a loop backward primer, or any combination thereof 169. The method of embodiment 87, the method further comprising amplifying the target deoxyribonucleic acid with a forward inner primer, a backward inner primer, a forward outer primer, a backward outer primer, a loop forward primer, a loop backward primer, or any combination thereof 170. The method of any one of embodiments 88-125, wherein the amplifying comprises contacting the sample to a forward inner primer, a backward inner primer, a forward outer primer, a backward outer primer, a loop forward primer, a loop backward primer, or any combination thereof 171. The system or method of any one of embodiments 3, 32, or 163, wherein the coronavirus is SARS CoV-2. 172. The method of embodiment 105, wherein the nucleic acid amplification method is loop mediated amplification (LAMP).

### EXAMPLES

[0598] The following examples are illustrative and non-limiting to the scope of the devices, systems, fluidic devices, kits, and methods described herein.

### Example 1

### Testing of Influenza

[0599] A biological sample from an individual can be tested to determine whether the individual has influenza. The biological sample can be tested to detect the presence or absence of a target nucleic acid indicative of a influenza A or influenza B virus.

[0600] An individual obtains a biological sample of urine and applies the biological sample to the reagents described herein in a reagent chamber provided in a kit. The reagents comprise a guide nucleic acid targeting a nucleic acid present in and specific to the virus, a programmable nuclease, and a single stranded detector nucleic acid with a detection moiety. The biological sample has the influenza virus, and the target nucleic acid from the virus binds to the guide nucleic acid and activates the programmable nuclease to cleave the target nucleic acid and the single stranded detector nucleic acid.

[0601] After the sample and the reagents are contacted for a predetermined time, the individual can apply the reacted sample and reagents to a sample pad region on a support medium. The support medium comprises a lateral flow assay test strip encased in a protective housing with openings for the sample pad region to apply the reacted sample and reagents and for a detection region for reading the test results. The housing also has fiduciary markers, a reference color scale, and a barcode that identifies the test performed by the kit. As the reacted sample and reagents move along the lateral flow assay test strip to the detection region, the detection moiety from the cleaved single stranded detector nucleic acid binds with a capture molecule on the support medium and a detection molecule in a detection region to generate a detectable signal on the support medium. The detectable signal can be line in the detection region of the support medium. Once the test is complete, a line for a positive control marker and another line for a positive test become visible through the detection region opening.

[0602] After a predetermined amount of time after applying the reacted sample and reagents to the support medium, the individual can use a mobile device to obtain the test results. The individual can open a mobile application for reading of the test results on a mobile device with a camera and take an image of the support medium, including the detection region, barcode, reference color scale, and fiduciary markers on the housing, using the camera of the mobile device and the GUI of the mobile application. The mobile application identifies the test based on the barcode in the image, analyzes the detection region in the image with the fiduciary markers and a reference color scale on the housing in the same image based on the identification of the test with the barcode, and determines the presence or absence of the virus. The mobile application can present the results of the test to the individual. The mobile application can store the test results in the mobile application. The mobile application can communicate with a remote device and transfer the data of the test results. The test results can be viewable remotely from the remote device by another individual, including a healthcare professional.

### Example 2

### Testing of Influenza—Dipstick Method

[0603] A biological sample from an individual can be tested to determine whether the individual has influenza. The biological sample can be tested to detect the presence or absence of a target nucleic acid indicative of influenza A or influenza B.

[0604] An individual obtains a biological sample of urine and applies the biological sample to the reagents described herein in a reagent chamber provided in a kit. The reagents comprise a guide nucleic acid targeting a nucleic acid present in and specific to the virus, a programmable nuclease, and a single stranded detector nucleic acid.

[0605] After the sample and the reagents are contacted for a predetermined time, the individual can place one end of a support medium into the reagent chamber to apply the reacted sample and reagents to a sample pad region on the support medium. The support medium comprises a lateral flow assay test strip. As the reacted sample and reagents move along the test strip to the detection region, a line for a positive control marker becomes visible in the detection region. After a predetermined amount of time after applying the reacted sample and reagents to the support medium, the support medium can be placed into a protective housing with an opening for the detection region for reading the test results, fiduciary markers, a reference color scale, and a barcode that identifies the test performed by the kit.

[0606] The individual can use a mobile device to obtain the test results. The individual can open a mobile application for reading of the test results on a mobile device with a camera and take an image of the support medium, including the detection region, barcode, reference color scale, and fiduciary markers on the housing, using the camera of the mobile device and the mobile application. The mobile application identifies the test based on the barcode in the image, analyzes the detection region in the image with the fiduciary markers and a reference color scale on the housing in the same image based on the identification of the test with the barcode, and determines the presence or absence of the virus. The mobile application can present the results of the test to the individual.

### Example 3

### Testing of Influenza—In Situ Cleaving on Support Medium

[0607] A biological sample from an individual can be tested to determine whether the individual has influenza. The biological sample can be tested to detect the presence or absence of a target nucleic acid indicative of influenza A or influenza B virus.

[0608] An individual obtains a biological sample of urine and applies the biological sample to the reagents described herein on a sample pad region on a support medium provided in a kit. The reagents comprise a guide nucleic acid targeting a nucleic acid present in and specific to the virus, a programmable nuclease, and a single stranded detector nucleic acid. The support medium comprises a lateral flow assay test strip encased in a protective housing with an opening for the detection region for reading the test results, fiduciary markers, a reference color scale, and a barcode that identifies the test performed by the kit.

[0609] After the sample and the reagents are contacted for a predetermined time on the support medium, the reacted sample and reagents move along the support medium to a detection region on the support medium. The individual can optionally place a small volume of buffer to help move the reacted sample and reagents to the detection region. As the reacted sample and reagents move along the test strip to the detection region, a line for a positive control marker becomes visible in the detection region.

[0610] The individual can use a mobile device to obtain the test results. The individual can use a mobile device to obtain the test results. The mobile application identifies the test based on the barcode in the image, analyzes the detection region in the image, and determines the presence or absence of the virus. The mobile application can present the results of the test to the individual.

### Example 4

### Testing of Multiple Influenza Viruses—Multiple Lateral Flow Assay

[0611] A biological sample from an individual can be tested to determine whether the individual has one or more than one strains of influenza (e.g., influenza A, influenza B. The biological sample can be tested to detect the presence or absence of one or more of target nucleic acids, where the individual target nucleic acid is indicative of a virus.

[0612] An individual obtains a biological sample of urine and applies the biological sample to multiple reagent chambers provided in a kit to test for a panel of influenza virus strains. Each reagents chamber comprise the reagents specific to detect one influenza virus strain. The reagents in each reagent chamber comprise a guide nucleic acid targeting a nucleic acid present in the virus; a programmable nuclease; and a single stranded detector nucleic acid.

[0613] After the sample and the reagents are contacted for a predetermined time, the individual can apply the reacted sample and reagents from one of the reagent chambers to a matched sample pad region on a support medium. Each reagent chamber has a matching sample pad region on the support medium. The support medium comprises multiple lateral flow assay test strips encased in a protective housing with openings for the matched sample pad regions to apply the reacted sample and reagents from the matching reagent chamber and for a detection region for reading the test results. The housing also has fiduciary markers, a reference color scale, and a barcode that identifies the tests performed by the kit. As the reacted sample and reagents move along the lateral flow assay test strip to the detection region, a positive control marker for each lateral flow test strip becomes visible through the detection region opening.

[0614] After a predetermined amount of time after applying the reacted sample and reagents to the support medium, the individual can use a mobile device to obtain the test results. The individual can use a mobile device to obtain the test results. The individual can use a mobile device to obtain the test results. The mobile application identifies the test based on the barcode in the image, analyzes the detection region in the image, and determines the presence or absence of the virus (influenza A, influenza B, or influenza A and B). The mobile application can present the results of the test to the individual.

### Example 5

### Testing of Multiple Strains of Influenza—Multiplexed Lateral Flow Assay

[0615] A biological sample from an individual can be tested to determine whether the individual has one or more than one strains of influenza (e.g., influenza A, influenza B. The biological sample can be tested to detect the presence or absence of one or more of target nucleic acids, where the individual target nucleic acid is indicative of a virus.

[0616] An individual obtains a biological sample of urine and applies the biological sample to a reagent chamber provided in a kit to test for a panel of influenza virus strains. The reagents chamber comprises multiple sets of reagents to detect multiple influenza virus strains. One set of reagents to detect one influenza strain comprise a guide nucleic acid targeting a nucleic acid present in and specific to the virus; a programmable nuclease; and a single stranded detector nucleic acid.

[0617] After the sample and the reagents are contacted for a predetermined time, the individual can apply the reacted sample and reagents to a sample pad region on a support medium. The support medium comprises a multiplexed lateral flow assay test strip that can detect multiple detector molecules on the test strip. The lateral flow assay strip encased in a protective housing with openings for the sample pad region to apply the reacted sample and reagents and for a detection region for reading the test results. The housing also has fiduciary markers, a reference color scale, and a barcode that identifies the tests performed by the kit. As the reacted sample and reagents move along the lateral flow assay test strip to the detection region, a positive control marker for each lateral flow test strip becomes visible through the detection region opening.

[0618] After a predetermined amount of time after applying the reacted sample and reagents to the support medium, the individual can use a mobile device to obtain the test results. The individual can use a mobile device to obtain the test results. The individual can use a mobile device to obtain the test results. The mobile application identifies the test based on the barcode in the image, analyzes the detection region in the image, and determines the presence or absence of the virus. The mobile application can present the results of the test to the individual.

### Example 6

### Detection of a Nucleic Acid from a Respiratory Virus Using a Fluidic Device

[0619] This example illustrates detection of a nucleic acid from a respiratory virus (e.g., an influenza virus) using a fluidic device. A CRISPR-Cas reaction for detection of a target nucleic acid from a respiratory virus (e.g., an influenza virus) in a sample is carried out using a fluidic device.

[0620] FIG. 1 shows a schematic illustrating a workflow of the CRISPR-Cas reaction. Step 1 in the workflow is sample preparation, Step 2 in the workflow is amplification of a target nucleic acid from a respiratory virus (e.g., an influenza virus). Step 3 in the workflow is Cas reaction incubation. Step 4 in the workflow is detection (readout). Steps 1 and 2 are optional, and steps 3 and 4 can occur concurrently, if detection and readout are incorporated to the Cas reaction. FIG. 2 shows a fluidic device for sample preparation that is used. The sample preparation fluidic device processes different types of biological sample. The biological sample is finger-prick blood, urine or swabs with fecal, nasal swab, cheek swab or other collection. The sample is prepared in a fluidic device of FIG. 2 and is then introduced into a fluidic device.

[0621] The fluidic device is one of the three fluidic devices of FIG. 3 or the fluidic device of FIG. 5. The three fluidic devices of FIG. 3 carry out a Cas reaction with a fluorescence or electrochemical readout. An exploded view diagram summarizing the fluorescence and electrochemical processes that are used for detection of the reaction are shown in FIG. 4. FIG. 4 shows schematic diagrams of a readout process that are used including (a) fluorescence readout and (b) electrochemical readout. FIG. 5 shows a fluidic device for coupled invertase/Cas reactions with colorimetric or electrochemical/glucometer readout. This diagram illustrates a fluidic device for miniaturizing a Cas reaction coupled with the enzyme invertase. Surface modification and readout processes are depicted in exploded view schemes at the bottom including (a) optical readout using DNS, or other compound and (b) electrochemical readout (electrochemical analyzer or glucometer).

[0622] A sample containing the target nucleic acid of interest from a respiratory virus (e.g., an influenza virus) is introduced into a fluidic device of FIG. 2. The sample is filtered and introduced into a fluidic device of FIG. 3 or FIG. 5, wherein the nucleic acid of interest is, optionally, amplified, and incubated with pre-complexed Cas mix. The Cas-gRNA complex binds to its matching nucleic acid target from the amplified sample and is activated into a non-specific nuclease, which cleaves a nucleic acid-based reporter molecule to generate a signal readout. A target nucleic acid of interest from a respiratory virus (e.g., an influenza virus) is detected using a fluorescence readout, an electrochemical readout, or an electrochemiluminescence readout, as shown in FIG. 4 or an optical readout or electrochemical readout, as shown in FIG. 5.

### Example 7

### Electrochemical Detection of Target Nucleic Acids from a Respiratory Virus via DETECTR Reactions using CRISPR/Cas Systems

[0623] This example describes electrochemical detection of target nucleic acids from a respiratory virus (e.g., an influenza virus) in DETECTR reactions using CRISPR/Cas systems. In this assay a biotin-streptavidin signal enhancement method is employed using a biotinylated CRISPR-Cas reporter molecule, which is cleaved by the enzyme in the presence of a positive DETECTR reaction (one in which the target nucleic acid is present).

[0624] Electrochemical detection is tested as an alternative to (1) use of ferrocene-labelled oligos immobilized on the electrode surface and (2) coupling of DETECTR to an invertase catalyzed reaction, also disclosed herein. The latter reaction produces glucose that be detected with a glucometer directly, or indirectly. Electrochemical detection and detection using ferrocene-labelled oligos are both potentiometric, while invertase catalyzed reactions are amperometric.

[0625] The reporter is cleaved using a DNAse enzyme and cleavage results in an increase in current at an oxidation peak compared to when the reporter was intact. Results are collected using a benchtop, gold-standard electrochemical analyzer (uSTAT, Metrohm, USA). The sequence of the reporter is /5Biosg/TTTTTTTTTTTTTTTTTTTT/3MeBlN/ (SEQ ID NO: 373). A cyclic voltammogram is obtained, wherein cleavage of the electroactive reporter leads to an increase in current.

### Example 8

### Fluorescence-Based Device for Detection of Target Nucleic Acids from a Respiratory Virus via DETECTR Reactions Using CRISPR-Cas Systems

[0626] This example describes a fluorescence-based device for detection of target nucleic acids from a respiratory virus (e.g., an influenza virus) in DETECTR reactions using CRISPR-Cas systems. Two approaches are used to develop a miniaturized device for DETECTR reactions for detection of target nucleic acids from a respiratory virus (e.g., an influenza virus). First, a glass capillary (Drummond Scientific, USA) is used as a single, capillarity driven vessel of the DETECTR reaction. Both flash-dried and liquid formulations of the reagents are used. Second, a commercially-available, plastic (TOPAS) microfluidic chip (Microfluidic Chip Shop, Germany) with no mechanical actuation for mixing or reagent delivery is used.

[0627] Results are collected using (1) a portable, photodiode-based fluorescence sensor (ESELog, Quiagen Lake Constance, Germany) and (2) a commercially-available transilluminator (E-GEL, Thermofisher, USA). The major advancements of the detection capabilities of this system includes an on-chip DETECR reaction. Real-time measurement of fluorescence from a one-pot reverse transcription-recombinase polymerase amplification-in vitro transcription (RT-RPA-IVT)-DETECTR reaction is carried out on chip

### Example 9

### Guide Pooling for High Sensitivity and Broad Spectrum Detection of Target Nucleic Acids from a Respiratory Virus

[0628] This example describes guide pooling for high sensitivity and broad spectrum detection of target nucleic acids from a respiratory virus (e.g., an influenza virus). While traditional detection requires one gRNA per target sequence/organism, the guide pooling methods disclosed herein, including use of multiple gRNAs with one or more CRISPR effector proteins, is amenable for both improving sensitivity (in the case of guide tiling across a single target sequence/organism) and broad spectrum detection (in the case of detecting multiple target sequences/organisms in a single reaction). Thus, guide pooling is a useful method for enhancing detection sensitivity performance as well as functioning as an initial triage step that is rapid and low-cost (e.g., an “alert” for blood-borne pathogens, pandemic flu, pan-bacterial detection, etc.) as compared to traditional diagnostic methods.

[0629] To perform a DETECTR assay, a guide RNA (crRNA) is first complexed to the Cas protein. The complexing reaction is carried out at 37° C. for 30 minutes. Reporter and additional buffer are then added to complete the complex master mix. Finally, the complex is added to the samples to detect sequences specifically targeted by the guide. By pooling multiple guide RNAs designed to target difference sequences or different sequence segments of the same target, it is possible to broaden the detection spectrum in a single reaction and increase the detection efficiency. To achieve this, guide RNAs are individually complexed to Cas protein at high concentration. Multiple guide-protein complex reactions are pooled. After pooling, the reporter and addition buffer are added to complete the pooled complexes for use in the DETECTR assay.

[0630] A. Guide Pooling for Detection of Influenza Strains

[0631] Methods for guide pooling for detection of influenza strains involved using guide RNAs for different influenza strains (e.g., strains from IAV and/or IBV). Multiple guide RNAs (e.g., 15-20) are designed to target lthe influenza strains.

[0632] The programmable nuclease used in the DETECTR assay is LbCas12a (SEQ ID NO: 27). The reporter is an 8-mer ssDNA with a FAM-labeled 5′ end and an Iowa Black FQ-labeled 3′ end.

[0633] Guide RNA (crRNA) are individually complexed with LbCas12a protein at high concentration. Each crRNA is mixed with LbCas12a in 1× MBuffer 2 (20 mM Tris HCl, pH8, 100 mM NaCl, 5 mM MgCl2, 1 mM DTT, 5% glycerol, 50 ug/mL Heparin). The concentrations of the crRNA and protein are at least 4-fold higher than those in the standard single guide complexing reaction. The mixture is incubated at 37° C. for 30 minutes to form the guide-protein complex. TABLE 8 below lists the formulation of the complexing reaction. The volumes are for one DETECTR reaction, and can be scaled up accordingly.

TABLE 8

| Component | Volume (μL) |
|---|---|
| 5X MBuffer 2 | 1 |
| crRNA (20 μM) | 0.8 |
| LbCas12a (5 μM) | 3.2 |
| TOTAL | 5 |

[0634] Guide Pooling. At the completion of the incubation, guide pools are generated by combining equal volume of individual guide-protein complexing reactions. Several pools at different n-plex (n=number of different guides) levels are generated.

[0635] 5 ul of the complexing reaction is used in each 20 ul DETECTR assays. The effective concentration in the assay of guides and protein is one fourth of those in the complexing reactions.

[0636] Complex Master Mix. Complex Master Mixes of the guide pools are completed by adding equal volume of Mix2 (containing the ssDNA reporter and additional buffer, the formulation is listed in TABLE 9).

TABLE 9

| Component | Volume (μL) |
|---|---|
| H2O | 0.8 |
| ssDNA reporter (10 μM) | 0.2 |
| 5x MBuffer 2 | 3 |
| Glycerol 80% | 1 |
| Total | 5 |

[0637] Additionally, Mix2 is added to individual guide-protein complexing reaction to generate single guide complex master mix. In the complex master mix, the concentrations of the guides and proteins are diluted in half

[0638] DETECTR assay. The targets are diluted to 200 pM and 20 pM. In each DETECTR assay, 10 ul of complex master mix is mixed with 10 ul of sample in a well of a 384-well plate. The effective concentrations of the guides and protein are one fourth of those in the complexing reaction. The reaction is carried out in a TECAN Infinite 200 pro plate reader at 37 C. The fluorescence raw data file is analyzed using internal software. The kinetics of the DETECTR assay is measured by max rate (estimated rate of cleavage of the reporter by the activated Cas protein). The activity of the guide pools versus the single guide is measured against 200 pM targets (100 pM targets in the final reaction).

[0639] Signals are clearly boosted by guide pooling. For example, the signal increases as the n-plex level is increased to 10- and 20-plex and the detection sensitivity is improved from the single guide detection. The guide pools can be adjusted to detect difference targets.

[0640] Using guide pooling, detection of 10 pM targets, which is near the detection limit of the single guide assay, is improved and the pooling of the guides improves the sensitivity of the assay.

[0641] B. Guide pooling Top-Performing Individual gRNAs to Increase Assay Sensitivity for Detection of RSV

[0642] Guide pooling was used to improve the detection limit of an assay for RSV detection. 33 guide RNAs for RSV guides were designed by tiling across the target region. The guide RNAs were screened for activities and top performing guides were selected for pooling. RNA corresponding to the RSV target was generated from in vitro transcription (IVT) reaction. A Cas13a protein was used and the reporter was a 5-mer ssRNA with a 5′ FAM and a 3′ Iowa Black FQ. FIG. 6A shows a panel of gRNAs for RSV evaluated for detection efficiency. Darker squares in the background subtracted row indicate greater efficiency of detecting RSV target nucleic acids. FIG. 6B shows graphs of pools of gRNA versus background subtracted fluorescence. The left most graph shows pooling of RSV gRNAs for detection of 4 pM of target nucleic acids. The middle graph shows pooling of RSV gRNAs for detection of 800 fM of target nucleic acids. The right most graph shows pooling of RSV gRNAs for detection of 160 fM of target nucleic acids. gRNA sequences used in the RSV study are summarized below in TABLE 10.

TABLE 10

| Guide name | SEQ ID NO | crRNA Sequence |
|---|---|---|
| R0443 | SEQ ID NO: 18 | GCCACCCCAAAAAUGAAGGGGACUAAAACAUCC |
| | | UACAAAAAAAUGCUAAA |
| R0444 | SEQ ID NO: 19 | GCCACCCCAAAAAUGAAGGGGACUAAAACACCU |
| | | ACAAAAAAAUGCUAAAA |
| R0445 | SEQ ID NO: 20 | GCCACCCCAAAAAUGAAGGGGACUAAAACACUA |
| | | CAAAAAAAUGCUAAAAG |
| R0449 | SEQ ID NO: 21 | GCCACCCCAAAAAUGAAGGGGACUAAAACAAGA |
| | | AACAUUUGAUAACAAUG |
| R0450 | SEQ ID NO: 22 | GCCACCCCAAAAAUGAAGGGGACUAAAACAGAA |
| | | ACAUUUGAUAACAAUGA |
| R0452 | SEQ ID NO: 23 | GCCACCCCAAAAAUGAAGGGGACUAAAACAAAC |
| | | AUUUGAUAACAAUGAAG |
| R0453 | SEQ ID NO: 24 | GCCACCCCAAAAAUGAAGGGGACUAAAACAACA |
| | | UUUGAUAACAAUGAAGA |
| R0456 | SEQ ID NO: 25 | GCCACCCCAAAAAUGAAGGGGACUAAAACAUGC |
| | | CUAUAACAAAUGAUCAG |
| R0457 | SEQ ID NO: 26 | GCCACCCCAAAAAUGAAGGGGACUAAAACAGCC |
| | | UAUAACAAAUGAUCAGA |

### Example 10

### Optimization of Temperature and Temperature Tolerance of CRISPR-Cas Proteins in CRISPR DETECTR Assays for Detection of Target Nucleic Acids from Respiratory Viruses

[0643] This example describes optimization of temperature and temperature tolerance of CRISPR-Cas proteins in CRISPR DETECTR assays for detection of target nucleic acids from respiratory viruses (e.g., influenza virus). The CRISPR diagnostics of the present disclosure leverage the unique biochemical properties of Type V (e.g., Cas12) and Type VI (e.g., Cas13) CRISPR-Cas proteins to enable the specific detection of nucleic acids. These proteins are directed to bind a target nucleic acid from a respiratory virus (e.g., an influenza virus) by a CRISPR RNA (crRNA), which is also known as a guide RNA (gRNA). Once bound to a complementary target sequence, the Cas protein initiates indiscriminate cleavage of surrounding single-strand DNA or single-strand RNA. When coupled to a quenched fluorescence reporter or other cleavage reporter, fluorescent or other signal is generated by the Cas protein only in the presence of the target nucleic acid. CRISPR-Cas proteins are isolated from a variety of natural contexts and therefore have different tolerances for elevated temperatures and optimal temperature ranges. These different tolerances for temperature are used to activate or inhibit the proteins at different stages to allow for other molecular processes, such as target amplification of nucleic acids from respiratory viruses (e.g., an influenza virus), to occur.

[0644] In DETECTR assays in which the target nucleic acid is from a respiratory virus (e.g., an influenza virus) and a Cas12 variant (SEQ ID NO: 37) programmable nuclease is used, the Type V protein Cas12 variant has a functional range between 25° C. and 45° C., with maximal activity at 35° C. For the Type V protein LbCas12a (SEQ ID NO: 27), the functional range is from 35° C. to 50° C. with peak activity around 40° C. For the Type VI protein LbuCas13a (SEQ ID NO: 131) the functional range is between 25° C. and 40° C. with maximal activity between 30° C. and 35° C. Type V proteins, such as the Cas12 variant and LbCas12a, are stable and functional at elevated temperatures. In DETECTR assays in which the target nucleic acid is from a respiratory virus (e.g., an influenza virus), the Cas12 variant exhibits activity at a temperature of 37° C. This temperature shifting is exploitable for use in isothermal amplification methods, where the amplification occurs at a higher temperature, but after lowering the reaction temperature the Cas protein is activated without compromising its functionality.

[0645] In DETECTR assays in which the target nucleic acid is from a respiratory virus (e.g., an influenza virus), the Cas12 variant is stable after exposure to elevated temperatures for 30 minutes and then lowering the reaction temperature to 37° C. The Cas12 variant is active in 0.5× NEBuffer4 (New England Biolabs)+0.05% Tween and 1× MBuffer3.

### Example 11

### Sample Preparation Protocol and Device Workflow

[0646] This example describes sample preparation protocol and device workflow. Collecting and processing material for diagnostic analysis is typically performed at a point of care facility or a clinical laboratory. There are minimal methods currently available for at home sample collection and nucleic acid extraction for diagnostic analysis. The devices disclosed herein provide an over the counter solution for nucleic acid extraction with or without nucleic acid amplification and with or without the DETECTR reaction. The resulting product from any or all of these modules is applied to a readout device for data collection and subsequent analysis.

[0647] A crude sample preparation protocol includes elution of a sample from a sample collection device (e.g. swab) into a buffer that will induce dissociation of the sample into its macromolecule components releasing the genomic nucleic acids. These components include any or all of the following: pH change, chaotropic salts and a detergent (Tween 20, Triton X-100, Deoxycholate, Sodium laurel sulfate or CHAPS. This protocol occurs in a stepwise work flow that would feed into a hand held device. In this device there is at least one chamber that contains the reagents components for the sample preparation protocol.

[0648] FIG. 7 shows individual parts of sample preparation devices of the present disclosure. Part A of the figure shows a single chamber sample extraction device: (a) the insert holds the sample collection device and regulates the step between sample extraction and dispensing the sample into another reaction or detection device, (b) the single chamber contains extraction buffer. Part B of the figure shows filling the dispensing chamber with material that further purifies the nucleic acid as it is dispensed is an option: (a) the insert holds the sample collection device and regulates the “stages” of sample extraction and nucleic acid amplification. Each set of notches (red, blue and green) are offset 90° from the preceding set, (b) the reaction module contains multiple chambers separated by substrates that allow for independent reactions to occur. (e.g., i. a nucleic acid separation chamber, ii. a nucleic acid amplification chamber and iii. A DETECTR reaction chamber or dispensing chamber). Each chamber has notches (black) that prevent the insert from progressing into the next chamber without a deliberate 90° turn. The first two chambers may be separated by material that removes inhibitors between the extraction and amplification reactions. Part C shows options for the reaction/dispensing chamber: (a) a single dispensing chamber may release only extracted sample or extraction/amplification or extraction/amplification/DETECTR reactions, (b) a duel dispensing chamber may release extraction/multiplex amplification products, and (c) a quadruple dispensing chamber would allow for multiplexing amplification and single DETECTR or four single amplification reactions.

[0649] FIG. 8 shows a sample work flow using a sample processing device. The sample collection device is attached to the insert portion of the sample processing device (A). The insert is placed into the device chamber and pressed until the first stop (green tabs meet black tabs) (B). This step allows the sample to come into contact with the nucleic acid extraction reagents. After the appropriate amount of time, the insert is turned 90° (C.) and depressed (D) to the next set of notches. These actions transfer the sample into the amplification chamber. The sample collection device is no longer in contact with the sample or amplification products. After the appropriate incubation, the insert is rotated 90° (E) and depressed (F) to the next set of notches. These actions release the sample into the DETECTR (green reaction). The insert is again turned 90° (G) and depressed (H) to dispense the reaction.

[0650] Examples of crude sample preparation protocols are summarized in TABLE 11.

TABLE 11

| | | | | | Incubation | Incubation |
|---|---|---|---|---|---|---|
| Name | Sample | HCl | Detergent | Urea | time | temperature |
| Low pH | Clinical | Yes | N/A | No | 15 minutes | RT |
| | reminant | | | | | |
| Low pH + heat | Clinical | Yes | N/A | No | 15 minutes | 60° C. |
| | reminant | | | | | |
| Deoxycholate | Clinical | No | Yes | No | 15 minutes | RT |
| | reminant | | | | | |
| Deoxycholate + | Clinical | No | Yes | No | 15 minutes | 60° C. |
| heat | reminant | | | | | |
| CHAPS | Clinical | No | Yes | No | 15 minutes | RT |
| | reminant | | | | | |
| CHAPS + heat | Clinical | No | Yes | No | 15 minutes | 60° C. |
| | reminant | | | | | |
| Deoxycholate + | Clinical | No | Yes | Yes | 15 minutes | RT |
| Urea | reminant | | | | | |
| Deoxycholate + | Clinical | No | Yes | Yes | 15 minutes | 60° C. |
| Urea + heat | reminant | | | | | |
| CHAPS + Urea | Clinical | No | Yes | Yes | 15 minutes | RT |
| | reminant | | | | | |
| CHAPS + Urea + | Clinical | No | Yes | Yes | 15 minutes | 60° C. |
| heat | reminant | | | | | |
| NucleoSpin | Clinical | No | Yes | Yes | 3 minutes | RT |
| Control | reminant | | | | | |

[0651] FIG. 9 shows extraction buffers used to extract Influenza A RNA from remnant clinical samples. Replicate remnant clinical samples were exposed to the reagents listed in TABLE 11 above. The extraction process was completed using the NucleoSpin Virus kit. qPCR analysis was performed to evaluate the quality and quantity of extracted RNA genome. The low pH condition resulted in RNA amounts equal to the sample extracted with the ‘gold standard’ kit (RT-pool).

[0652] FIG. 10 shows that low pH conditions allow for rapid extraction of Influenza A genomic RNA. Decreasing time of exposure to low pH conditions did not affect the efficiency of viral dissociation and subsequent extraction completed using the NucleoSpin Virus kit. The amount of extracted product was similar to the ‘gold standard’ extractions (RT-pool).

### Example 12

### Isothermal Amplification in CRISPR-Cas Diagnostics

[0653] This example describes methods of isothermal amplification in the CRISPR-Cas diagnostics of the present disclosure, including those diagnostics involving DETECTR assays. CRISPR diagnostics leverage the unique biochemical properties of Type V (e.g. Cas12) and Type VI (e.g. Cas13) CRISPR-Cas proteins to enable the specific detection of nucleic acids. These proteins are directed to their target nucleic acid by a CRISPR RNA (crRNA), which is also known as a guide RNA (gRNA). Once bound to a complementary target sequence, the Cas protein initiates indiscriminate cleavage of surrounding single-strand DNA or single-strand RNA. When coupled to a quenched fluorescence reporter or other cleavage reporter, fluorescent or other signal can be generated by the Cas protein only in the presence of the target nucleic acid. Alone these proteins are capable of detecting in the pM or fM range of target nucleic acid. When coupled to nucleic acid amplification set forth in this example and disclosed elsewhere herein, the sensitivity of CRISPR diagnostics was increased to the aM or zM range. PCR is a commonly used nucleic acid amplification method that generates double stranded DNA (dsDNA) when temperatures are cycled between two or three different temperatures. Nucleic acid amplification methods that function at single temperature are known as isothermal amplification. These methods include LAMP, RPA, SIBA, SDA, and NASBA. These methods can be coupled to reverse transcription (RT) which enables these methods to amplify RNA targets by first converting the RNA to cDNA through reverse transcription.

[0654] CRISPR based diagnostics using Type V (e.g., Cas12) and CasVI (e.g., Cas13) proteins were run using isothermal amplification methods of target nucleic acids to enable sensitive diagnostic assays.

[0655] RPA. Recombinase polymerase amplification (RPA) was used to amplify DNA sequences or RNA sequences by including a reverse transcription enzyme in the reaction (RT-RPA). RPA and RT-RPA can be used to generate an amplicon suitable for detection by Type V (e.g. Cas12) Cas proteins.

[0656] FIG. 11 shows the application of RT-RPA to the detection of Influenza A, Influenza B, and human Respiratory Syncytial Virus (RSV) viral RNA by Cas12a. By including a T7 promoter on one of the RPA primers, an in vitro transcription (IVT) reaction using an RNA polymerase to convert RNA to DNA step was performed after the RPA reaction to generate target RNA for detection by Type VI (e.g. Cas13) proteins. In FIG. 11, detection of RT-RPA amplicon was carried out from 4000 copies of Influenza A (IAV), Influenza B (IBV), and human respiratory syncytial virus (RSV) RNA using Cas12a. The RT-RPA reaction was performed at 40° C. for 30 minutes. Controls included no RT enzyme, no target control, and no primer control. Following the RT-RPA reaction, the RT-RPA amplicon was transferred to a Cas12a DETECTR assay.

[0657] FIG. 12 shows the application of RT-RPA coupled with an IVT reaction enabling detection of viral RNA using Cas13a. In FIG. 12, detection of RT-RPA amplifcon was carried out from 2 fM of PPR virus RNA using Cas13a. The RT-RPA reaction was performed at 40° C. for 30 minutes. Several reverse transcriptase enzymes were evaluated for their compatibility with the RPA reaction. Controls included no RT enzymes, no target, and no primers. Following the RT-RPA reaction, the RT-RPA amplicon was transferred to an IVT reaction for generation of RNA at 37° C. for 10 minutes. The product of the IVT reaction was diluted and added to a Cas13a reaction at 37° C. On-target and off-target crRNAs were used to demonstrate specificity of the Cas13a reaction.

[0658] A “two-pot” DETECTR assay was carried out using RPA and Cas13a by combining the IVT reaction with the RT-RPA or RPA reaction to generate RNA simultaneously with the RPA reaction. FIG. 13 shows the production of RNA, as detected by Cas13a, from an RNA virus using an RT-RPA-IVT “two-pot” reaction. In the two-pot reaction, the first reaction was the RT-RPA-IVT, and the second reaction as the Cas13a detection assay. Components of the IVT (T7 RNA polymerase, NTPs) were added to a RT-RPA reaction in the presence of RNA transcription buffer (RPA rehydration buffer from Twist Dx “buffer 1”) or RPA rehydration buffer (20 mM imidazole, pH 7.5; 50 mM KCl; 5 mM MgCl2; BSA 10 μg/mL; 0.01% Igepal Ca-630; 5% glycerol “buffer 2”). As a control, RT-RPA without the RNA polymerase was added. 2 fM of PPR virus RNA was used as the target RNA in these reactions. The reaction proceeded for 15 minutes at 37° C. and on-target and off-target crRNAs were used to show specificity.

[0659] The IVT and Cas13a detection assay reactions were combined with RT-RPA or an RPA reaction to generate and detect RNA simultaneously in a “one-pot” assay. FIG. 14 shows the effect of various buffers on the performance of a one-pot Cas13a assay. Components for RT-RPA were combined in a single reaction with both components for IVT (T7 RNA polymerase, NTPs) and Cas13a detection (Cas13a enzyme, crRNA, fluorescent cleavage reporter). The reaction was run in three buffers (buffer 1: RPA rehydration buffer, buffer 2: Cas13a buffer, and buffer 3: Cas12a buffer (20 mM Tris-HCl, pH 8.0; 100 mM NaCl; 5 mM MgCl2; 1 mM DTT; 5% glycerol; 50 μg/mL heparin)). Reactions without the RNA polymerase were used as controls. In addition, specificity was shown by comparing a reaction with an on-target crRNA to a reaction with an off-target crRNA. The reaction was allowed to proceed at 40° C. for 10 minutes.

[0660] FIG. 15 shows the specific detection of viral RNA from the PPR virus that infects goats using the one-pot Cas13a assay. 500 aM of viral RNA was added to the reaction and the reaction was incubated at 40° C. As a control, an identical reaction without the T7 RNA polymerase (“PPRV-noIVT”; graph at right) was used to show the specific production of RNA for Cas13a to detect. An on-target and off-target crRNA was used to demonstrate assay specificity.

[0661] FIG. 16 shows the specific detection of Influenza B using the one-pot Cas13a assay run at 40° C. 40 fM of viral RNA was added to the reaction. As a control, an identical reaction without reverse transcriptase (labeled “−RT”) was used to show the specific production of RNA for Cas13a to detect. An on-target and off-target crRNA was used to demonstrate assay specificity.

[0662] FIG. 17 shows the tolerance of the one-pot Cas13a assay for the detection of RNA from the Influenza B virus in the presence and in the absence of a universal viral transport medium called universal transport media (UTM Copan) at 40° C. 40 fM of viral RNA was added to the reaction. As a control, an identical reaction without reverse transcriptase (−RT) was used to show the specific production of RNA for Cas13a to detect. An on-target and off-target crRNA was used to demonstrate assay specificity.

[0663] FIG. 18 shows the one-pot Cas13a detecting Influenza A (a), Influenza B (b), and human RSV (c) RNA at various temperatures. 100,000 viral genomes were added to the reaction and compared to reactions containing 0 copies. Reactions were run at either 30° C., 32.5, 35° C., 37.5° C., or 40° C. The assay was determined to be most robust between 35° C. and 37.5° C.

[0664] LAMP. Loop-mediated isothermal amplification (LAMP) was also used for amplifying a DNA sequences or RNA sequences in combination with a reverse transcriptase enzyme (RT-LAMP). LAMP reactions use a combination of four, five, or six primers to amplify the target DNA or cDNA from RNA. During the course of the LAMP reaction, concatemers of amplicons form. If RT-LAMP or LAMP amplicons contain sequence features that support Cas protein recognition (such as PAM or PFS), they can be used as target nucleic acids in CRISPR diagnostics.

[0665] FIG. 19 shows the optimization of a LAMP reaction for the detection of an internal amplification control using a DNA sequence derived from the Mammuthus primigenius (Wooly Mammoth) mitochondria. In addition, FIG. 19 shows the specific detection of the LAMP amplicon by Cas12a using a variety of crRNAs. FIG. 19A shows a schematic of the workflow including providing DNA/RNA, LAMP/RT-LAMP, and Cas12a detection. FIG. 19B shows the time to result for LAMP reactions for an internal amplification control using a DNA sequence derived from the Mammuthus primigenius, as quantified by fluorescence. The time to result was determined by the time to reach half of max fluorescence for a reaction. Controls include off-target Hela genomic DNA and a no target control. FIG. 19C shows Cas12a specific detection at 37° C. of LAMP amplicon from the 68° C. temperature reaction. Two on-target crRNAs were tested. Specificity was shown by no detection from Hela genomic DNA amplicon or no template control (NTC) amplicon.

[0666] FIG. 20 shows the optimization of LAMP and Cas12 specific detection of the human POP7 gene (ACTCCGCAGCCCGTTCAGGACCCCGGCGCGGGCAGGGCGCCCACGAGCTGGCTGGC TGCTTGCACCCACATCCTTCTTTCTCTGGGACCTGGGGTCGCGGTTACTTGGGCTGGC CGGCGAACCCTTGAGTGGCCTGGCGGGGAGCGGGCCTCGCGCGCCTGGAGGGCCCT GTGGAACGAAGAGAGGCACACAGCATGGCAGAAAACCGAGAGCCCCGCGGTGCTG TGGAGGCTGAACTGGATCCAGTGGAATACACCCTTAGGAAAAGGCTTCCCAGCCGC CTGCCCCGGAGACCCAATGACATTTATGTCAACATGAAGACGGACTTTAAGGCCCA GCTGGCCCGCTGCCAGAAGCTGCTGGACGGAGGGGCCCGGGGTCAGAACGCGTGCT CTGAGATCTACATTCACGGCTTGGGCCTGGCCATCAACCGCGCCATCAACATCGCGC TGCAGCTGCAGGCGGGCAGCTTCGGGTCCTTGCAGGTGGCTGCCAATACCTCCACCG TGGAGCTTGTTGATGAGCTGGAGCCAGAGACCGACACACGGGAGCCACTGACTCGG ATCCGCAACAACTCAGCCATCCACATCCGAGTCTTCAGGGTCACACCCAAGTAATTG AAAAGACACTCCTCCACTTATCCCCTCCGTGATATGGCTCTTCGCATGCTGAGTACT GGACCTCGGACCAGAGCCATGTAAGAAAAGGCCTGTTCCCTGGAAGCCCAAAGGAC TCTGCATTGAGGGTGGGGGTAATTGTCTCTTGGTGGGCCCAGTTAGTGGGCCTTCCT GAGTGTGTGTATGCGGTCTGTAACTATTGCCATATAAATAAAAAATCCTGTTGCACT AGT, SEQ ID NO: 339) that is a component of RNase P. This sequence is present in human DNA and RNA and was used as a control for the efficiency of sample extraction (sample control). FIG. 20A shows a schematic of the workflow including providing DNA/RNA, LAMP/RT-LAMP, and Cas12a detection. FIG. 20B shows the time to result of a LAMP/RT-LAMP reaction for RNase P POP7 at different temperatures, as quantified by fluorescence. Time to result was determined by the time to reach half of max fluorescence for a reaction. Controls included off-target mouse-liver-RNA and a no target control. Hela total RNA and Hela genomic RNA were detected by the RT-LAMP and LAMP reactions, respectively. FIG. 20C shows three graphs demonstrating Cas12a specific detection at 37° C. of LAMP/RT-LAMP amplicon from the 68° C. temperature reaction. Two on-target crRNAs were tested and one off-target crRNA was tested. Specificity was shown by no detection of mouse total RNA amplicon or no template control (NTC) amplicon.

[0667] Cas12 was also used for the detection of RT-LAMP products. FIG. 21 shows the specific detection of three different RT-LAMP amplicons for Influenza A virus. The data from this experiment shows that the design of RT-LAMP primers around Cas12a compatible sites was important for the specificity of the experiment. The primer and crRNA were optimized and combined for specific detection of Influenza A (IAV) by RT-LAMP. Briefly, three different primer sets were tested for RT-LAMP that were specific to IAV. RT-LAMP reactions were performed either in the presence of IAV RNA or as a control with no template (NTC). For each amplicon, two on-target crRNAs and one off-target crRNA was used in a Cas12a detection assay at 37° C.

[0668] FIG. 22 shows the identification of optimal crRNAs for the specific detection of Influenza B (IBV) RT-LAMP amplicons. The RT-LAMP reaction was performed for 30 minutes at 60° C. in the presence of Influenza A (IAV) RNA, IBV RNA, or a no template control (NTC). For the resulting amplicons, three on-target crRNAs were used to determine which was most specific and efficient for the detection of Influenza B by Cas12a at 37° C.

[0669] The primers of an RT-LAMP or LAMP reaction were combined for multiplexed amplification. Because of the formation of concatemers during RT-LAMP and LAMP, it is difficult to differentiate between amplicons in a multiplex RT-LAMP or LAMP reaction by conventional means, as shown in FIG. 23. Multiplexed RT-LAMP for Influenza A (IAV) and Influenza B (IBV) was carried out for 30 minutes at 60° C. RT-LAMP reactions were incubated with 10,000 viral genome copies of IAV, IBV, or both IAV and IBV. A no-target control (NTC) was used that contained 0 viral genome copies. 0.5 uL of the RT-LAMP product after the 30 minute incubation was run on a 1% agarose gel. FIG. 23 shows the results of the 1% agarose gel with bands showing the products of the RT-LAMP reaction. As seen in the gel, it is difficult to differentiate between the IAV, IBV, and IAV +IBV samples. The application of Type V (e.g. Cas12) enzymes identified which amplicons were amplified in a multiplexed RT-LAMP or LAMP reaction. FIG. 24 shows Cas12a discrimination between amplicons from a multiplex RT-LAMP reaction for Influenza A and Influenza B. FIG. 24A shows a schematic of the workflow including providing viral RNA, multiplexed RT-LAMP, and Cas12a influenza A detection or Cas12a influenza B detection. FIG. 24B shows Cas12a detection of RT-LAMP amplicons after 30 minute multiplexed RT-LAMP amplification at 60° C. Multiplexed amplification contained primer sets for Influenza A (IAV) and Influenza B (IBV). Reactions contained 10000 viral genome copies or 0 copies as a control. Targets for IAV only, IBV only, and IAV and IBV combined were used. FIG. 24C shows background subtracted fluorescence at 30 minutes of Cas12a detection at 37° C. of RT-LAMP amplicons for 10,000 viral genome copies of IAV and IBV. crRNAs specific for IAV and IBV enable discrimination for which viral sample was present. Similarly, FIG. 25 shows Cas12a discrimination between a triple multiplexed RT-LAMP reaction for Influenza A, Influenza B, and the Mammuthus primigenius (Wooly Mammoth) mitochondria internal amplification control sequence after 30 minutes of multiplexed RT-LAMP amplification at 60° C. Multiplexed amplification contained primer sets for Influenza A (IAV), Influenza B (IBV), and the Mammoth internal amplification control (Mammoth IAC). Reactions contained 100,000 viral genome copies or 500 aM of the IAC. Targets for IAV only, IBV only, multiplexed IAV+IBV, and multiplexed IAV+IBV+Mammoth IAC were used. Cas12a detection assays at 37° C. with IAV, IBV, and Mammoth IAC specific crRNAs were performed to differentiate the amplicons from the multiplexed reactions.

[0670] By including a T7 promoter sequence in the forward inner primers (FIP) or backward inner primers (BIP) of a LAMP or RT-LAMP reaction, the resulting amplicon can be added to an in vitro transcription reaction to generate RNA, as shown in the schematic in FIG. 26. This RNA can be used in a Type VI (e.g. Cas13) detection assay. FIG. 26A shows a schematic illustrating the identity of the primers used in LAMP and RT-LAMP. Primers LF and LB are option in some LAMP and RT-LAMP designs, but generally increase the efficiency of the reaction. FIG. 26B shows a schematic illustrating the position and orientation of the T7 promoter in a variety of LAMP primers.

[0671] FIG. 27 shows that a T7 promoter can be included on the F3 or B3 primers (outer primers), or FIP or BIP primers for Influenza A. However, only T7 promoters located in the FIP or BIP primers are capable of generating enough RNA to enable a Cas13a detection assay. FIG. 27A shows a schematic of the workflow including providing DNA/RNA, LAMP/RT-LAMP, in vitro transcription, and Cas13a detection. FIG. 27B shows the time to result for RT-LAMP reactions for Influenza A using different primer sets, as quantified by fluorescence. Each primer set contained a T7 promoter sequence in a different position. Time to result was determined by the time to reach half of max fluorescence for a reaction. No target was used as a specificity control. The results demonstrated that the B3+T7 and BIP+T7 sense primer sets worked best for RT-LAMP reaction. The reaction was performed at 68° C. for 30 minutes. FIG. 27C shows in vitro transcription (IVT) with T7 RNA polymerase of the product of the RT-LAMP reactions for Influenza A using different primer sets at 37° C. for 10 minutes. A Cas13a detection assay at 37° C. was then used to detect the RNA products from the IVT reaction. Three different on-target crRNAs were used along with an off-target crRNA to demonstrate specificity. The BIP+T7 sense and antisense primer sets worked best for RNA production, along with on-target crRNA #2. Thus, the BIP+T7 sense primer set in conjunction with crRNA #2 worked best for the detection of RNA after a RT-LAMP reaction followed by an IVT reaction.

[0672] SIBA. Strand invasion based amplification (SIBA) is another isothermal method that can be used. FIG. 28 shows the detection of a RT-SIBA amplicon for Influenza A by Cas12. In SIBA and RT-SIBA reactions for Cas12, the guide RNA is not complementary to the invasion oligo and the amplicon contains a PAM. The RT-SIBA reaction was performed at 41° C. for 60 minutes with a starting RNA concentration of 500 aM. Controls for the RT-SIBA reaction included a no target control and a no primer control. After the completion of the RT-SIBA reaction, 2 μL of amplicon was added to a 20 μL Cas12a detection reaction. On-target and off-target crRNAs were used to show specific detection of by Cas12.

### Example 13

### Optimization of Assay Conditions for CRISPR DETECTR-based Diagnostic Assays for Detection of Target Nucleic Acids from Respiratory Viruses

[0673] This example describes optimization of assay conditions for the CRISPR-Cas DETECTR-based diagnostic assays disclosed herein for the detection of target nucleic acids from respiratory viruses (e.g., an influenza virus). The components of the DETECTR reaction, such as protein concentration, crRNA, and buffer components impact the rate and efficiency of the reaction. Optimization of the buffers allows for the development of an assay with increased sensitivity and specificity.

[0674] Cas13M26 (LbuCas13a (SEQ ID NO: 131)) performs optimally in DETECTR reactions in buffers with decreased amounts of tRNA without changing the stability of the reaction. Decreasing the amount of tRNA in the reaction or eliminating it completely, increases the efficiency of the Cas13a detection assay without dramatically changing the stability of the reaction in the absence of activator. Buffers in which Cas13a exhibits activity in a DETECTR assay for detection of nucleic acids from a respiratory virus (e.g., influenza virus) lack or have low amounts of urea and SDS. Additionally, Cas13a exhibits activity in DETECTR assays for detection of nucleic acids from a respiratory virus (e.g., influenza virus) in buffers comprising NaCl or KCl, with 30 mM salt or below, and/or with 0-10 mM DTT in buffers containing either NaCl or KCl. Cas13a also exhibits activity, as measured by fluorescence, for a number of reporters, including a “U5” reporter (/5-6FAM/rUrUrUrUrU/3IABkFQ/ (SEQ ID NO: 1)), a “UU” reporter (/56-FAM/TArUrUGC/3IABkFQ/ (SEQ ID NO: 381)), and a reporter with the same nucleotide sequence as the “U5” reporter but with a different fluorophore and quencher, “TYE665U5” (/5-TYE665/rUrUrUrUrU/3IABkRQ/ (SEQ ID NO: 1)). Optimal buffer compositions and pH for Cas13a DETECTR assays include buffers with a pH around 7.5 and buffers imidazole, phosphate, tricine, and SPG.

[0675] Cas13a performance is improved in NEBuffer2 (NEBuffer 2.1; 1× Buffer Components, 50 mM NaCl, 10 mM Tris-HCl, 10 mM MgCl2, 100 μg/ml BSA, pH 7.9@25° C.) and Cutsmart (1× Buffer Components, 50 mM Potassium Acetate, 20 mM Tris-acetate, 10 mM Magnesium Acetate, 100 μg/ml BSA, pH 7.9@25° C.). Cas13a performs optimally in MBufferl. 1× MBuffer1 includes 20 mM imidazole pH 7.5, 50 mM KCl, 5 mM MgCl2, 10 μg/μL BSA, 0.01% Igepal Ca-630, and 5% glycerol. Additionally, Cas13a performance is improved in buffers comprising 5% glycerol, BSA, and NP-40 improve Cas13a DETECTR assay. NP-40 (Igecal-Ca 630) increases the efficiency of the Cas13a detection assay and small amounts of BSA also improve the performance of the assay. Concentrations of 0.05% to 0.0625% NP-40 are the most optimal and concentrations of 2.5 to 0.625 μg/mL BSA are desirable.

[0676] Buffers lack compounds that inhibit the performance of the Cas13a DETECTR assay, including: beryllium sulfate, manganese chloride, zinc chloride, tri-sodium citrate, copper chloride, yttrium chloride, 1-6-Diaminohexane, 1-8-diaminooctane, ammonium fluoride, ethanolamine, lithium salicylate, magnesium sulfate, potassium cyanate, and sodium fluoride.

[0677] LbCas12a (SEQ ID NO: 27) exhibits optimal activity in DETECTR assays for detection of target nucleic acids from respiratory viruses (e.g., influenza viruses) using buffers with a pH 8.0 and the following buffer types: AMPD, BIS-TRISpropane, DIPSO, HEPES, MOPS, TAPS, TRIS, and tricine buffers. LbCas12a exhibits activity in DETECTR assays with low KCl concentrations (0-40 mM or less than 20 mM salt and less KCl).

[0678] A Cas12 variant (SEQ ID NO: 37) performs optimally in a pH of 7.5 and in buffers including DIPSO, HEPES, MOPS, TAPS, imidazole, and tricine. The Cas12 variant performs best at a salt concentration of around 4 mM (ranging from 2-10 nM) and exhibits increased activity in buffers with MgOAc and KOAc (acetate buffers), in comparison to buffers with MgCl and KCl. Additionally, the Cas12 variant is inhibited by heparin and prefers low salt.

[0679] Buffers lack specific compounds inhibiting the performance of the Cas12 variant DETECR assay include: benzamidine hydrochloride, beryllium sulfate, manganese chloride, potassium bromide, sodium iodine, zinc chloride, di-ammonium hydrogen phosphate, tri-lithium citrate, tri-sodium citrate, cadmium chloride, copper chloride, yttrium chloride, 1-6 diaminohexane, 1-8-diaminooctane, ammonium fluoride, and ammonium sulfate. Compounds that increase assay performance included: polyvinyl alcohol type II, DTT, DMSO, polyvinylpyrrolidone K15, polyethylene glycol (PEG) 600, and polypropylene glycol 400.

[0680] SNP differentiation is stronger for the Cas12 variant along the 3′ end of a crRNA (distal from the PAM). LbCas12a (SEQ ID NO: 27) displays strong mutation sensitivity at all positions along target sequences, and sensitivity on the PAM proximal (complementary to the 5′ end of the crRNA target sequence) end and is more sensitive to mutations in this region and mutation sensitivity is target site dependent.

### Example 14

### Lateral Flow Test Strips for Visual Detection of Target Nucleic Acids from a Respiratory Virus in DETECTR Reactions Using CRISPR-Cas Systems

[0681] This example describes a lateral flow test-strip for visual detection of target nucleic acids from a respiratory virus (e.g., an influenza virus) in DETECTR reactions using CRISPR-Cas systems. Visual readouts for the DETECTR reaction are developed to have a low-cost format and be amenable to high-volume manufacturing. Described here are custom-made lateral flow strips. Colloidal gold nanoparticles are conjugated to antibodies and the gold nanoparticles serve as a visual readout in the assay. Two commercially available lateral flow strips are tested including: (1) Millenia Hybridetect 1, TwistDx (UK, now part of Abbott) and (2) PCRD, Abingdon Health (UK).

[0682] Results are collected by: (1) visual inspection of the strips, and (2) obtaining a cell-phone-camera picture of the strips. Unlike commercially available lateral flow test strips, the custom-made lateral flow strip design disclosed herein includes a new type of CRISPR-Cas reporter molecule, which is made of (1) a 6-Fluorescein (FAM) moiety; (2) a biotin moiety; and (3) a DNA-based oligo linker, which are irreversibly conjugated to the DETECTR reaction chamber upstream of the reaction.

[0683] Lateral Flow Strips for Read Out of a Cas12 variant and LbCas12a. Lateral flow strips are tested for readout of a Cas12 variant (SEQ ID NO: 37) and LbCas12a (SEQ ID NO: 27). Complexing reactions include final concentrations of 40 nM of crRNA per reaction, 40 nM of final protein per reaction, and 500 nM of reporter per reaction. Complexing reactions are incubated at 37 C for 30 min, the reporter substrate is added, and 15 uL of the complexing reactions are aliquoted into PCR tubes. 5 uL of diluted PPR virus PCR product is added and the target (e.g., a sample containing a target nucleic acid from a respiratory virus) and complex are incubated at 37 C for 20 min. 100 uL of Mllenia GenLine Dipstick Assay Buffer (Tween or Triton) is added and the dipstick is inserted into the solution with target and complex. Test strips are photographed and the top band was quantified using ImageJ.

[0684] MNT-Lateral Flow, Au NP Conjugation. Anti-FAM and anti-ROX polyclonal antibodies are conjugated to gold nanoparticles for downstream use in the custom made lateral flow strips. Materials include Corning Spin-X UF 500 uL Concentrators and a Gold in a Box Conjugation kit. A 0.5× buffer solution is prepared by diluting PBS, pH 7.2 (1×) in 1:1 with nuclease-free water. 100 ul of the MNT antibody and 100 ul of a FITC antibody are used. Spin concentrators are used to exchange native buffer from 0.1M Tris glycerine, pH 7 with 10% glycerol to 0.5× PBS for both antibodies. Washes with 100 ul of 0.5× PBS are carried out and the concentrators were spun for 1.5 min at 18,000 rcg (×g) for each wash. Antibodies are eluted in 100 ul of 0.5× PBS. Gold conjugation is carried out as per manufacturer's instructions. Tubes are labeled MNT1-10 and FITC1-10 and 7 ul of each antibody was added. Reactions are incubated for 30 min in a shaking incubator at room temperature. The reaction is stopped by adding 50 uL of a BSA blocking buffer to each tubes, and tubes are stored at 4 C.

[0685] Lateral Flow Strips for Read Out of LbuCas13a. Lateral flow strips are tested for readout of LbuCas13a. TwistDx lateral flow strips are used to test the FAM-US-Biotin (SEQ ID NO: 1) (rep71 reporter). Assays are run at room temperature at a variety of target concentrations. Complexing reactions include final concentrations of 40 nM of crRNA per reaction, 40 nM of final protein per reaction, and 500 nM of reporter per reaction. Complexing reactions are incubated at 37 C for 30 min. Dilutions of the target are added to the reaction including at 10 nM, 1 nM, 0.1 nM, 0.01 nM, and no target. 30 uL of the complexing reaction is added to the target and incubated for 15 minutes at room temperature. The reaction is placed on ice and 10 uL of the reaction is pipetted directly onto the lateral flow sample area. 50 uL of Milenia GenLine Dipstick Assay buffer is added and the strip was photographed.

[0686] Conjugation of 3′Amino Reporter to NHS Beads Using Kit. An NHS FlexiBind Magnetic Bead Kit is used to conjugate the 3′amino modified lateral flow reporter allowing for the intended usage of the lateral flow devices (Milenia Hybrid), where the ligand is detected first and the control line serves as the flow control. The sequence of the reporter used is /56-FAM/*/iBiodT/*AATTAATTAATTAATTAATT/3AmMO/ (SEQ ID NO: 372).

[0687] Bead conjugation is carried out as follows. Rep75 is resuspended to 100 μM in Wash/Coupling Buffer (PBS, pH 7.4). 32.5 nmol is delivered from IDT and 5.4 nmol (54 μL) of rep75 is used. 20% NHS FlexiBind Magnetic beads are resuspended by vortexing for 20 seconds. 100 μL of bead slurry is pipetted into a 1.5 mL microcentrifuge tube. Magnetic beads are pelleted on the magnetic stand until the solution became clear. Storage buffer is removed and discarded. 100 μL of ice-cold Equilibration buffer (1 mM HCl) is immediately added. The reaction is removed from the magnet and vortexed for 20 seconds, then placed back on the magnet to pellet beads. The supernatant is removed and discarded and 54 μL of 100 μM rep75 in PBS is added. Beads are incubated at room temperature with interval mixing: 2 min rest, 15 sec mix at 1200 rpm for 2 hours. Tubes are placed in a magnetic stand to allow the beads to migrate to the magnet. Unbound ligand is removed and saved for analysis.

[0688] 0.5 μL raw reporter is measured in 20 μL NFW vs. 0.5 μL post-conjugation supernatant in 20 μL NFW on a plate reader until it is no longer visibly green. 500 μL of Quench buffer is added, vortexed for 30 seconds, and pelleted with a magnetic rack. The supernatant is discarded and the sample is washed 5 times. Beads are resuspended in 500 μL of Quench Buffer and incubated for 1 hour at room temperature. The beads are pelleted with a magnetic rack and the buffer is removed and discarded. The beads are resuspended in 100 μL of Wash/Coupling Buffer (PBS, pH 7.4) and the beads are kept on ice in dark tube.

[0689] Testing uncleaved/unconjugated reporter with lateral flow is carried out using 2× NG-40-B009 Naked Gold Sol beads—40 nm—15 OD—9 mL, FITC antibody (Invitrogen TB265150), anti-IgG (Invitrogen A16098), Streptavadin (NEB N7021S), pH 8.8, and three batches—Batch 1: AU (5 μL)→anti-IgG (μL)→Strep (0.5 μL), Batch 2: AU (5 μL)→strep (1 μL)→anti-IgG (1 μL), and Batch 3: AU (2.5 μL)→strep (1 μL)→anti-IgG (1 μL).

[0690] Test beads with a Cas12 variant (SEQ ID NO: 37) by first complexing reaction. Reactions are run with final concentrations of 40 nM crRNA per reaction, 40 nM protein per reaction, and 100, 250, 500, or 1000 nM reporter per reaction. The complex is incubated at 37 C for 30 min. The 40 μM stock of beads is diluted to 1:10 to 4 μM. Reporter beads are added to 5 μL PPRV diluted PCR product or NFW, 15 μL of complexing reaction was added to target. The reaction is incubated at 37 C for 30 min with shaking at 2000 rpm in Thermomixer. Beads are pelleted with magnetic rack for 2 minutes. 10 μL of reaction is transferred to a new tube, 50 μL of Dipstick Assay Buffer is added, and 60 μL diluted reaction is placed on magnet before adding solution to lateral flow strips. Reactions are run on Milenia flow strips.

[0691] FIG. 29 shows the layout of a Milenia commercial strip with a typical reporter. This schematic shows an analyte-independent universal dipstick with a sample application region at right followed by a wicking region immediately to the left, followed to the left by a region containing a biotin ligand, followed to the left by a region spotted with anti-rabbit antibody. The sample and analyte-specific solution are incubated with analyte detectors bearing a biotin or FITC. Samples are run on the strip. A positive result shows two bands—the left most band is from the control band and is due to binding of anti-FITC antibody coated gold nanoparticles to an anti-rabbit antibody. The right band is from the test band itself and is due to binding by the biotin ligand to an analyte detector bearing biotin, where the detector complexes the analyte and wherein the analyte is further complexed to another detector bearing FITC, which is then bound to the anti-FITC antibody coated gold particle. In the negative result—only one band is seen at the control line.

[0692] FIG. 30 shows the layout of a Milenia HybridDetect 1 strip with an amplicon. This schematic shows at top PCR amplicon using FAM and biotin primers at the right end of the top figure. In the case of a positive result, the strip shows two bands—this PCR amplicon binds to a moiety immobilized at the test line, and the FAM molecule (shown as a start) binds to an anti-FAM antibody coated particle. To the left of the test line is a flow control line, containing anti-rabbit antibody which binds to anti-FAM antibody coated nanoparticles. In the case of a negative result, the strip shows one band—that is, just binding of anti-FAM antibody coated nanoparticles bound to anti-rabbit antibody immobilized on the test strip.

[0693] FIG. 31 shows the layout of a Milenia HybridDetect 1 strip with a standard Cas reporter. A positive result is shown at top where a Cas protein cleaves the standard reporter, and only one band is seen—due to binding of the anti-FAM antibody coated nanoparticles to anti-rabbit antibody spotted on the strip. A negative result is shown at bottom where the intact reporter binds to a moiety immobilized on the strip and all anti-FAM antibody coated nanoparticles bind at the control line to the FAM molecule on the intact Cas reporter. Results of running samples with target nucleic acids and with a water only control show that even with the water only control, a false positive band appears at the test line.

[0694] FIG. 32 shows a modified Cas reporter comprising a DNA linker to biotin-dT (shown as a pink hexagon) bound to a FAM molecule (shown as a green start). This entire modified Cas reporter was conjugated to magnetic beads or the surface of the reaction chamber, which was upstream of the strip. This is shown in the schematic as immobilization of the modified Cas reporter to the substrate of the DETECTR chamber/bead. During cleavage by a Cas (shown as a yellow pac-man), the biotin-FAM molecule is released from the DNA linker. Unlike other assay formats, this particular assay format contains the entire Cas cleavage reaction to the reaction chamber. In this assay format, the test-line is the actual test line and the control line is a true control line. FIG. 33 shows the layout of Milenia HybridDetect strips with the modified Cas reporter. At top, a positive result is shown, where in the Cas reaction chamber, the Cas protein cleaves the DNA linker segment of the modified Cas reporter. The biotin-dT/FAM molecule is released and flows down the test strip binding to streptavidin coated on the test line. An anti-FAM antibody coated gold nanoparticle binds to the biotin-DT/FAM reporter at the test line. Additionally the anti-FAM antibody coated gold nanoparticle binds to anti-rabbit antibody coated at the flow control line. At bottom, a negative result is shown where only the anti-FAM antibody coated gold nanoparticle binds to anti-rabbit antibody coated at the flow control line.

[0695] FIG. 34 shows an example of a single target assay format (to left) and a multiplexed assay format (to right). At the top are diagrams showing a schematic of the assay prior to use, anti-FAM antibody coated gold nanoparticles only (on left) or anti-FAM antibody coated gold nanoparticles and anti-ROX antibody coated gold nanoparticles (to right) are upstream of the control and test lines. The control lines are spotted with streptavidin and the test lines are spotted with only target A (left) or target A and target B (right). Assays with positive results are shown in the middle schematic and assays with negative results are shown in the lowest schematic.

[0696] FIG. 35 shows another variation of an assay prior to use (top), an assay with a positive result (middle left), an assay with a negative result (middle right), and a failed test (bottom). In this assay the flow control is at the left most end of the strip, followed by the test line coated with anti-IgG rabbit antibody, followed by the control line coated with streptavidin, followed by gold nanoparticles coated with anti-FAM or anti-biotin antibodies. The Cas reporters are upstream of the strip in a reaction chamber. If cleaved the Cas reporter is cleaved (positive result), FAM molecules bind to the anti-FAM coated gold nanoparticles, which subsequently bind at the test line and anti-biotin antibody coated nanoparticles bind at the control line to the DNA/RNA linker/biotin construct. If the Cas reporter is not cleaved (negative result), the intact reporter binds to streptavidin at the control line, where they are subsequently bound by anti-FAM coated gold nanoparticles.

[0697] Gold nanoparticle conjugation to anti-biotin antibody. A 100 ul aliquot of anti-biotin antibody is used, with the antibody suspended in nuclease free water. 7 ul of the dilute antibody in solution is added to tubes and reactions were incubated for 30 min in a shaking incubatory at room temperature. The reaction in each tube is stopped with the addition of 50 ul of the BSA blocked buffer and the tubes were stored at 4 C.

### Example 15

### Conjugation of Oligonucleotides to Peptides/Enzymes for Downstream Use in an Invertase-Coupled Assay for Amperometric detection of Target Nucleic Acids from a Respiratory

[0698] Virus in DETECTR Reactions Using CRISPR-Cas Systems

[0699] This example describes a conjugation method for oligonucleotides to peptides/enzymes for downstream use in an invertase coupled assay for amperometric detection of target nucleic acids from a respiratory virus (e.g., influenza virus) in DETECTR reactions using CRISPR-Cas systems. The methods disclosed herein are developed as alternatives to fluorescence and lateral-flow-immunochromatography readouts of DETECTR reactions and include efficient conjugation of an invertase enzyme to a DETECTR reporter using a 3′ thiol modification. The CRISPR-Cas reporter molecule for use in the invertase-coupled assay for amperometric detection of DETECTR reactions includes (1) a 5′-Biotin moiety and (2) a 3′-invertase enzyme. The sequence of the oligo was /5Biosg/TTTTTTTTTTTTTTTTTTTT/3ThioMC3-D/ (SEQ ID NO: 373) and the invertase enzyme is conjugated at the 3′ end. Reagents for the conjugation include invertase from Baker's yeast (S. Cerevisiae), streptavidin magnetic beads, Tris(2-carboxyethyl)phosphine hydrochloride (TCEP), N-Succinimidyl 4-(maleimidomethyl)cyclohexanecarboxylate, SMCC (SMCC), 1M sodium phosphate buffer, pH 7.2, 2-(NMorpholino)ethanesulfonic acid (MES), sodium chloride 5M sterile, and biotin labelled oligos.

[0700] Buffer and solution preparation. Buffers include (1) 0.1M Phosphate Buffer, no NaCl, pH 7.2, (2) 0.1M Phosphate Buffer, 0.1M NaCl, pH 7.2, (3) 0.05M MES Buffer, pH 5.5, and (4) 0.05M MES Buffer, with 0.1M NaCl, pH 5.5. TCEP solution, SMCC solution, and invertase solution is prepared from solids. The DNS reagent is also prepared.

[0701] Thiol activation of DNA oligo. The thiol-biotin-labelled oligos (15 μL, 1 mM in water) are mixed with TCEP (3 μL, 0.5M in water) in a 1.5-mL microcentrifuge tube. The reaction volume is made up to 30 μL with the addition of 12 μL of eqivalent buffer. The following twelve reactions are prepared: MB406 with low pH, no salt buffer; MB406 with low pH and salt buffer; MB406 with PBS, no salt; MB406 with PBS and salt buffer; MB407 with low pH, no salt buffer; MB407 with low pH and salt buffer; MB407 with PBS, no salt; MB407 with PBS and salt buffer; MB408 with low pH, no salt buffer; MB408 with low pH and salt buffer; MB408 with PBS, no salt; and MB408 with PBS and salt. In each buffer, the volume of DNA oligos is 15 μL, the volume of TCEP was 3 μL, and the volume of buffer was 12 μL. The reaction is incubated for 3-5 hours in the shaking incubator at 37° C. The reaction is stopped by snap freezing in liquid nitrogen. Microcentrifuge tubes are stored at −20° C. until the next step of the reaction. Thiol-activated oligo tubes are removed from the freezer 3 hours prior to conjugation to activated invertase/or other activated proteins/peptides. The tube is first incubated at 37° C. for 3 hours and then used in the conjugation reaction

[0702] SMCC activation of invertase enzyme. A fresh solution of invertase lab stock bottle is prepared. 10 mg of solid was weighed in a clean 1.5 mL microcentrifuge tube, 860 μL of buffer A (0.1M NaCl, 0.1M sodium phosphate buffer, pH 7.2) is added to make a solution of 20 mg/mL. 1 mg of SMCC is added to a 1.5 mL microcentrifuge tube and the reaction is initiated by addition of invertase solution (400 μL, 20 mg/mL in 0.1M NaCl, 0.1M sodium phosphate buffer, pH 7.2). The reaction is incubated in the shaking incubator at 37° C. for 24 hours.

[0703] Cleanup of SMCC-activated invertase. The reaction is removed from the shaking incubator (37° C.) after 23 hours and 15 minutes. SMCC-activated invertase is washed 8× and resuspended in 400 μL of buffer. Protein is quantified by the BCA method.

[0704] Re-activation of thiol-DNA oligo. The oligo is removed from −20° C. and incubated in the shaking incubator at 37° C. The reaction is initiated and incubated in the shaking incubator (37° C.) for 48 hours. The reaction is removed from the incubator and each reaction contained (1) 35 μL of invertase solution, and (2) 30 μL of thiol-DNA oligo solution.

[0705] Binding with streptavidin beads. 12.5 μL of streptavidin beads is mixed with 50 μL of the biotinylated DNA oligo previously conjugated with invertase enzyme in a 1.5-mL microcentrifuge tube. The reaction is incubated for 5 minutes at room temperature, beads were washed 5× with 50-μL aliquots of Buffer A on a magnetic rack to remove any unbound DNA oligo from the solution, and eluent from all the washes was checked for invertase activity (and thus inefficient binding between streptavidin and biotin molecules). During the last wash, beads are resuspended with 50 μL of Buffer A and beads were stored at 4° C.

[0706] Incubation with DNS/Sucrose. A reaction is prepared containing 5 μL of 20% sucrose, 30 μL DNS reagent, 25 μL of biotynlated DNA with invertase moiety. A color change is observed after incubation at high heat (95 C).

[0707] DNA-Invertase Conjugation. Conjugation is carried out using a heterobifunctional linker sulfo-SMCC. To 30 uL of 1 mM thiol-DNA in Millipore water, 2 uL of 1 M sodium phosphate buffer at pH 5.5 and 2 uL of 30 mM TCEP in Millipore water are added and mixed. This mixture is kept at room temperature for 1 hour and then purified by Amicon-10K using Buffer A (0.1 M NaCl, 0.1 M sodium phosphate buffer, pH 7.3, 0.05% Tween-20) without Tween-20 by 8 times. For invertase conjugation, 400 uL of 20 mg/mL invertase in Buffer A without Tween-20 is mixed with 1 mg of sulfo-SMCC. After vortexing for 5 minutes, the solution is placed on a shaker for 1 hour at room temperature. The mixture is then centrifuged and the insoluble excess sulfo-SMCC was removed. The clear solution is then purified by Amicon-100K using Buffer A without Tween-20 by 8 times. The purified solution of sulfo-SMCC-activated invertase is mixed with the above solution of thiol-DNA. The resulting solution is kept at room temperature for 48 hours. To remove un-reacted thiol-DNA, the solution is purified by Amicon-100K 8 times using Buffer A without Tween-20. Conjugation is also carried out using homobifunctional linker PDITC. To 60 uL of 1 mM amine-DNA in Millipore water, 30 uL of Buffer B (0.1 M sodium borate buffer, pH 9.2) are added and mixed. This solution is further mixed with 20 mg of PDITC dissolved in 1 mL DMF. The resulting solution is placed on a shaker and kept at room temperature in the dark for 2 hours. After that, the solution is mixed with 6 mL of Millipore water and 6 mL 1-butanol. After centrifuging for 15 min, the upper organic phase is discarded. The aqueous phase is then extracted with 4 mL 1-butanol three times, and purified by Amicon-10K using Buffer A without Tween-20 for 8 times to produce a PDITC-activated amine-DNA solution. The PDITC activation ratio is over 90% as determined by MALDI-TOF mass spectrometry obtained after desalting the DNA product. Then, 10 mg of invertase is added to the activated DNA solution in Buffer A without Tween-20 to reach a final concentration about 5 mg/mL. The resulting solution is kept at room temperature for 48 hours. To remove un-reacted PDITC-activated amine-DNA, the solution is purified by Amicon-100K 8 times using Buffer A without Tween-20. Tween is not necessary for invertase activity; (2) 1 mg/ml invertase reaction likely finishes after 5 min; (3) 2% sucrose input produces red color at RT after ˜15 min; and (4) DNS is not effective for <0.2% sucrose.

### Example 16

### Lateral Flow Cleavage Reporters for CRISPR Diagnostics for Detection of Target Nucleic Acids from a Respiratory Virus

[0708] This example describes lateral flow cleavage reporters for CRISPR diagnostics for detection of target nucleic acids from a respiratory virus (e.g., an influenza virus). One design of the Cas reporters disclosed herein involves tethering the Cas reporter to the reaction chamber, upstream of the lateral flow test strip.

[0709] FIG. 36 shows one design of a tethered lateral flow Cas reporter. To the left is a DNA or RNA linker connecting a functional handle for chemical conjugation at the 3′ end (amine, thiol, etc.) and a biotin at the 5′ end (shown as a diamond) further connected to a FAM reporter molecule. This entire Cas reporter is conjugated to a magnetic bead and immobilized to the surface of the reaction chamber. After CRISPR-Cas cleavage reactions, the DNA/RNA linker is cleaved and the biotin/FAM reporter moiety is released.

[0710] FIG. 37 shows a workflow for CRISPR diagnostics using the tethered cleavage reporter using magnetic beads. First, CRISPR-Cas protein RNPs are incubated with target nucleic acids and magnetic beads were conjugated to the reporter. Magnetic beads are captured with a magnet, the supernatant is removed, and the sample is placed on a lateral flow strip with chase buffer.

[0711] Tethered cleavage reporters can also be used to multiplex readouts from CRISPR diagnostics. FAM-biotin and DIG-biotin reporter conjugated to magnetic beads is incubated with a Cas12 variant (SEQ ID NO: 37) for 30 minutes at 37 C in the presence or absence of target DNA (˜0.5 nM) in two separate DETECTR reactions. After the incubation period the magnetic beads are pelleted and the supernatant transferred to a PCRD lateral flow strip (Abingdon Health).

[0712] FIG. 38 shows a schematic for an enzyme-reporter system that is filtered by streptavidin-biotin before reaching the reaction chamber. The reporter structure is shown at left and includes a DNA/RNA linker connecting biotin and an enzyme. In the presence of the target (shown at top), Cas proteins cleave the linker in the Cas reaction chamber, leading to binding of biotin to the streptavidin inside of a capture chamber or on a paper strip, and enzymatic activity exhibited in a detection chamber containing the enzyme's substrate. In the absence of the target (shown at bottom), Cas proteins do not cleave the linker in the Cas reaction chamber, leading to binding of the full reporter inside of the capture chamber, and no enzyme (thus, no enzymatic activity) in the detection chamber containing the enzyme's substrate.

### Example 17

### Lateral Flow Assays for an Influenza CRISPR Diagnostic

[0713] This example describes a lateral flow assay for an influenza CRISPR diagnostic. A DNA or RNA linker is conjugated at the 5′end to biotin-dT/FAM and conjugated at the 3′ end to the substrate of a DETECTR chamber/bead, as shown in FIG. 32. These Cas reporters are inside a reaction chamber upstream of a lateral flow test strip. Cas enzymes and a sample containing target nucleic acids from an influenza virus are added, along with reagents for amplification. Amplified target nucleic acids activate transcleavage of the DNA or RNA linker by the Cas protein. The Cas protein is Cas12, Cas12a, Cas12b, Cas12c, Cas12d, Cas13, Cas13a, or Cas14. The biotin-dt/FAM reporter moiety is released and flows downstream to the test line where it binds streptavidin, as shown in FIG. 33. The biotin-dT/FAM reporter moiety is bound by anti-FAM antibody coated gold nanoparticles, which also bind to anti-rabbit antibody coated at a flow control line, thus revealing a positive test result. In the absence of target nucleic acids from an influenza virus in the sample, the Cas reporter remains immobilized to the substrate in the reaction chamber and anti-FAM antibody coated gold nanoparticles only bind to anti-rabbit antibody coated at a flow control line, thus revealing a negative test result.

### Example 18

### Multiplexed Influenza CRISPR Diagnostics

[0714] This example describes a lateral flow assay for an influenza CRISPR diagnostic. A DNA or RNA linker is conjugated at the 5′end to biotin-dT/FAM and a second DNA or RNA linker is conjugated at the 5′end to biotin-dT/ROX. Both reporters are conjugated at the 3′ end to the substrate of a DETECTR chamber/bead, as shown in FIG. 61. These Cas reporters are inside a reaction chamber upstream of a lateral flow test stripCas enzymes and a sample containing target nucleic acids from an influenza virus are added, along with reagents for amplification. Amplified target nucleic acids activate transcleavage of the DNA or RNA linker by the Cas protein. The Cas protein is Cas12, Cas12a, Cas12b, Cas12c, Cas12d, Cas13, Cas13a, or Cas14. The biotin-dt/FAM and/or the biotin-dt/ROX reporter moiety is released and flows downstream to the test line where it binds streptavidin, as shown in FIG. 33. The reporter moieties are bound by anti-FAM antibody and/or an anti-ROX antibody coated gold nanoparticles, which also bind to anti-rabbit antibody coated at a flow control line, thus revealing a positive test result. In the absence of target nucleic acids from an influenza virus in the sample, the Cas reporter remains immobilized to the substrate in the reaction chamber and anti-FAM antibody coated gold nanoparticles only bind to anti-rabbit antibody coated at a flow control line, thus revealing a negative test result.

### Example 19

### Diagnosing Influenza in Subject with a CRISPR Diagnostic

[0715] This example describes diagnosing influenza in a subject with a CRIPSR Cas diagnostic of the present disclosure. A sample is taken from a subject, such as a buccal swab or nasal swab. The subject has an undiagnosed illness. The sample is added to a CRISPR-Cas diagnostic of the present disclosure, for example, the CRISPR-Cas diagnostic of EXAMPLE 17. Guides are designed against influenza virus. The influenza virus is influenza A virus or influenza B virus. The target nucleic acid in the sample, corresponding to influenza, binds to the guide sequence, thus activating transcollateral cleavage of the Cas reporters by a Cas protein. The Cas protein is Cas12, Cas12a, Cas12b, Cas12c, Cas12d, Cas13, Cas13a, or Cas14. The CRISPR diagnostic, thus, reveals a positive result, and the subject is diagnosed with influenza.

### Example 20

### Influenza CRISPR-Cas Companion Diagnostic

[0716] This example describes an influenza CRISPR-Cas companion diagnostic of the present disclosure. A sample is taken from a subject, such as a buccal swab or nasal swab. The subject has influenza and has been prescribed and taking a flu therapeutic. The sample is added to a CRISPR-Cas diagnostic of the present disclosure, for example, the CRISPR-Cas diagnostic of EXAMPLE 17. Guides are designed against influenza virus. The influenza virus is influenza A virus or influenza B virus. The target nucleic acid in the sample, corresponding to influenza, binds to the guide sequence, thus activating transcollateral cleavage of the Cas reporters by a Cas protein. The Cas protein is Cas12, Cas12a, Cas12b, Cas12c, Cas12d, Cas13, Cas13a, or Cas14. The CRISPR diagnostic, thus, reveals a result, indicating that the flu therapeutic has not completely eliminated the influenza virus in the subject.

### Example 21

### Invertase-Nucleic Acid as a Detector Nucleic Acid

[0717] This example shows an invertase-nucleic acid as a detector nucleic for detection of a target nucleic acid from a respiratory virus (e.g., an influenza virus)in a programmable nuclease system.

[0718] FIG. 39 shows an invertase-nucleic acid used for the detection of a target nucleic acid. The invertase-nucleic acid, immobilized on a magnetic bead, is added to a sample reaction containing Cas protein, guide RNA, and a target nucleic acid. Target recognition activates the Cas protein to cleave the nucleic acid of the invertase-nucleic acid, liberating the invertase enzyme from the immobilized magnetic bead. This solution is either be transferred to the “reaction mix”, which contains sucrose and the DNS reagent and changes color from yellow to red when the invertase converts sucrose to glucose or is can be transferred to a hand-held glucometer device for a digital readout.

### Example 22

### Assay Layouts and Workflows for DETECTR Reactions

[0719] This example describes assay layouts and workflows for DETECTR reactions for detection of target nucleic acids from a respiratory virus (e.g., an influenza virus). An assay is provided that comprises separate chambers for amplification and reverse transcription versus a programmable nuclease-based detection assay. The programmable nuclease is a Cas12, Cas13, or Cas14. The sample is a biofluid collected by a swab and inserted into a swab collection reservoir. A pump drives the fluidics in the assay moving sample from chamber to chamber. A detectable signal is colorimetric, fluorescence-based, electrochemical and/or generated using an enzyme (e.g., invertase).

[0720] FIG. 40 shows one layout for a DETECTR assay. In this layout a swab collection cap seals a swab reservoir chamber. Clockwise to the swab reservoir chamber is a chamber holding the amplification reaction mix. Clockwise to the chamber holding the amplification reaction mix is a chamber holding the DETECTR reaction mix. Clockwise to this is the detection area. Clockwise to the detection area is the pH balance well. A cartridge wells cap is shown and seals all the wells containing the various reagent mixtures. The cartridge itself is shown as a square layer at the bottom of the schematic. To the right is a diagram of the instrument pipers pump which drives the fluidics in each chamber/well and is connected to the entire cartridge. Below the cartridge is a rotary valve that interfaces with the instrument. FIG. 41 shows one workflow of the various reactions in the DETECTR assay of FIG. 40. First, as shown in the top left diagram, a swab may be inserted into the 200 ul swab chamber and mixed. In the middle left diagram, the valve is rotated clockwise to the “swab chamber position” and 1 uL of sample is picked up. In the lower left diagram, the valve is rotated clockwise to the “amplification reaction mix” position and the 1 ul of sample is dispensed and mixed. In the top right diagram, 2 uL of sample is aspirated from the “amplification reaction mix”. In the top middle diagram, the valve is roated clockwise to the “DETECTR” position, the sample is dispsensed and mixed, and 20 ul of the sample is aspirated. Finally, in the bottom right diagram, the valve is rotated clockwise to the detection area position and 20 ul of the sample is dispensed. While the rotary valve is in a closed position, the sample is loaded into the swab lysis chamber and sealed using the cap. The sample is then incubated and mixed by the instrument with the lysis buffer. Following sample lysis, the rotary valve turns to align with the sample well and aspirates 2 to 4 μL of sample. The rotary valve then turns to align with the amplification chamber, where the sample is mixed with the amplification mixture. The sample is then aspirated, and the rotary valve rotates to the DETECTR chamber. In the DETECTR chamber, the sample mixes with the DETECTR mix. Actuation of the pipette pump mixes the reaction mixtures. The process may then be repeated from the amplification chamber to a second DETECTR chamber.

[0721] FIG. 42 shows a modification of the workflow shown in FIG. 41 that is also consistent with the methods and systems of the present disclosure. At left is the diagram shown at the top right of FIG. 41. At right is the modified diagram in which there is a first amplification chamber counterclockwise to the swab lysis chamber and a second amplification chamber clockwise to the swab lysis chamber. Additionally, clockwise to amplification chamber #2 are two sets, or “duplex”, DETECTR chambers labeled “Duplex DETECTR Chambers #2” and “Duplex DETECTR Chambers #1”, respectively. FIG. 43 shows breakdown of the workflow for the modified layout shown in FIG. 42. Specifically, from the swab lysis chamber, which holds 200 ul of sample, 20 ul of the sample can be moved to amplification chamber #1 and 20 ul of the sample can be moved to amplification chamber #2. After amplification in amplification chamber #1, 20 ul of the sample can be moved to Duplex DETECTR Chambers #1a and 20 ul of the sample can be moved to Duplex DETECTR Chambers # 1 b. Additionally, after amplification in amplification chamber #2, 20 ul of the sample can be moved to Duplex DETECTR Chambers #2a and 20 ul of the sample can be moved to Duplex DETECTR Chambers #2b.

[0722] FIG. 44 shows the modifications to the cartridge illustrated in FIG. 42 and FIG. 43. FIG. 45 shows a top down view of the cartridge of FIG. 44. This layout and workflow has a replicate in comparison to the layout and workflow of FIGS. 40-41. FIG. 46 shows a layout for a two-pot DETECTR assay. Shown at top is a pneumatic pump, which interfaces with the cartridge. Shown at middle is a top down view of the cartridge showing a top layer with reservoirs. Shown at bottom is a sliding valve containing the sample and arrows pointing to the lysis chamber at left, following by amplification chambers to the right, and DETECT chambers further to the right. FIG. 57 shows a schematic of the sliding valve device. FIG. 58 shows a layout and workflow for a sliding valve device. In the initial closed position (i.), the sample is loaded into the sample well and lysed. The sliding valve is then actuated by the instrument, and samples are loaded into each of the channels using the pipette pump, which dispenses the appropriate volume into the channel (ii.). The sample is delivered to the amplification chambers by actuating the sliding valve and mixed with the pipette pump (iii.). Samples from the amplification chamber are aspirated into each channel (iv.) and then dispensed and mixed into each DETECTR chamber (v.) by actuating the sliding valve and pipette pump.

### Example 23

### DETECTR Assays Versus PCR-Based Detection

[0723] This example describes a comparison of the DETECTR assays disclosed herein to the gold standard: PCR-based methods of detecting a target nucleic acid. Samples were either used as a crude prep for DETECTR assays (only lysed) or purified (lysed, bound, washed, and eluted) for PCR-based methods of detection. A DETECTR assay using a programmable nuclease (e.g., a Cas protein) is carried out on the crude sample. The programmable nuclease is activated by the target nucleic acid in a sample to which it binds via a reverse complementary guide RNA. The activated programmable nuclease indiscriminately cleaves a reporter generating a fluorescent detectable signal. Standard PCR-based methods were used to also detect the target nucleic acids in the sample.

[0724] FIG. 47 shows a comparison of the DETECTR assays disclosed herein to the gold standard PCR-based method of detecting a target nucleic acid. Shown is a flow chart showing a gradient of sample prep evaluation from crude (left) to pure (right). Sample prep steps that take a crude sample to a pure sample include lysis, binding, washing, and eluting. DETECTR assays disclosed herein may only need the sample prep step of lysis, yielding a crude sample. On the other hand, PCR-based methods can require lysis, binding, washing, and elution, yielding a very pure sample. The DETECTR assay disclosed herein can identify target nucleic acids from respiratory viruses (e.g., an influenza virus) just as well as gold standard PCR-based methods of detection.

### Example 24

### Cas13a Detection of DNA

[0725] This example describes Cas13a detection of target DNA. Cas13a was used to detect a target RT-LAMP DNA amplicon from Influenza A RNA. FIG. 48A shows a schematic The RT-LAMP reaction was performed at 55° C. for 30 minutes with a starting RNA concentration of 10,000 viral genome copies or 0 viral genome copies, as a control. Two different primer sets showed the same results (FIG. 48B and FIG. 48C). After completion of the RT-LAMP reaction, 1 μL of amplicon was added to a 20 μL Cas13a detection reaction. On-target and off-target crRNAs were used to show specific detection by Cas13a at 37° C. of the RT-LAMP DNA amplicon.

[0726] FIG. 48A shows a schematic of the workflow including providing DNA/RNA, LAMP/RT-LAMP, and Cas13a detection. FIG. 48B shows Cas13a specific detection of target RT-LAMP DNA amplicon with a first primer set as measured by background subtracted fluorescence on the y-axis. On-target crRNA results are shown by the darker bars and off-target crRNA control results are shown in lighter bars. A starting RNA concentration of 10,000 viral genome copies is shown in the left two bars and 0 viral genome copies (negative control) is shown in the right two bars. FIG. 48C shows Cas13a specific detection of target RT-LAMP DNA amplicon with a second primer set as measured by background subtracted fluorescence on the y-axis. On-target crRNA results are shown by the darker bars and off-target crRNA control results are shown in lighter bars. A starting RNA concentration of 10,000 viral genome copies is shown in the left two bars and 0 viral genome copies (negative control) is shown in the right two bars.

[0727] Cas13a recognized target ssDNA and target RNA. FIG. 49A shows a Cas13 detection assay using 2.5 nM RNA, single-stranded DNA (ssDNA), or double-stranded (dsDNA) as target nucleic acids, where detection was measured by fluorescence for each of the target nucleic acids tested. The reaction was performed at 37° C. for 20 minutes with both RNA-FQ (RNA-fluorescence quenched reporter) and DNA-FQ reporter substrates. Results showed that Cas13 initiates trans-cleavage activity for RNA-FQ for both target RNA and target ssDNA. Data was normalized to max fluorescence signal for each reporter substrate. FIG. 49B shows Cas12 detection assay using 2.5 nM RNA, ssDNA, and dsDNA as target nucleic acids, where detection was measured by fluorescence for each of the target nucleic acids tested. Reactions were performed at 37° C. for 20 minutes with both RNA-FQ and DNA-FQ reporter substrates. Results supported the previously established preference for Cas12 for either target ssDNA or target dsDNA and specificity for DNA-FQ. Data was normalized to max fluorescence signal for each reporter substrate. FIG. 49C shows the performance of Cas13 and Cas12 on target RNA, target ssDNA, and target dsDNA at various concentrations, where detection was measured by fluorescence for each of the target nucleic acids tested. Reactions were performed at 37° C. for 90 minutes with both RNA-FQ and DNA-FQ reporter substrates. Data was normalized to max fluorescence signal for each reporter substrate. Results indicated picomolar sensitivity of Cas13 for target ssDNA.

[0728] Cas13a trans-cleavage activity was found to be specific for RNA reporters when targeting target ssDNA. FIG. 50 shows an LbuCas13a (SEQ ID NO: 131) detection assay using 2.5 nM target ssDNA with 170 nM of various reporter substrates, wherein detection was measured by fluorescence for each of the reporter substrates tested. A single RNA-FQ reporter substrate (rep01—FAM-U5) was tested and 13 DNA-FQ reporter substrates were tested. TABLE 12 below shows the sequence of each of the reporters tested.

TABLE 12
Reporter Sequences

| | SEQ | |
|---|---|---|
| Reporter | ID | |
| ID | NO: | Sequence |
| rep01 | 1 | /56-FAM/rUrUrUrUrU/3IABkFQ/ |
| rep08 | 382 | /56-FAM/AAAAA/3IABkFQ/ |
| rep09 | 383 | /56-FAM/CCCCC/3IABkFQ/ |
| rep10 | 384 | /56-FAM/GGGGG/3IABkFQ/ |
| rep11 | 385 | /56-FAM/TTTTT/3IABkFQ/ |
| rep12 | 386 | /56-FAM/TTATTA/3IABkFQ/ |
| rep13 | 9 | /56-FAM/TTATTATT/3IABkFQ/ |
| rep14 | 387 | /56-FAM/ATTATTATTA/3IABkFQ/ |
| rep15 | 10 | /56-FAM/TTTTTT/3IABkFQ/ |
| rep16 | 388 | /56-FAM/TTTTTTT/3IABkFQ/ |
| rep17 | 12 | /56-FAM/TTTTTTTTTT/3IABkFQ/ |
| rep18 | 389 | /56-FAM/TTTTTTTTTTT/3IABkFQ/ |
| rep19 | 13 | /56-FAM/TTTTTTTTTTTT/3IABkFQ/ |
| rep30 | 390 | /FAM/CCGGCAGCCATAACGCCGTGAATACGTTCTGCCGG/BHQ1/ |

[0729] Results indicated that Cas13 trans-cleavage was specific for RNA reporters, even when activated by target ssDNA.

[0730] Multiple Cas13 family members detected target ssDNA. FIG. 51A shows the results of Cas13 detection assays for LbuCas13a (SEQ ID NO: 131) and LwaCas13a (SEQ ID NO: 137) using 10 nM or 0 nM of target RNA, where detection was measured by fluorescence resulting from cleavage of reporters over time. Three target RNAs encoding different sequences were evaluated with corresponding gRNAs. Results showed similar detection of all three target nucleic acids for both Cas13 family members. FIG. 51B shows the results of Cas13 detection assays for LbuCas13a and LwaCas13a using 10 nM or 0 nM of target ssDNA, where detection was measured by fluorescence resulting from cleavage of reporters over time. Three target DNA and their corresponding gRNAs, with the same sequence as the target RNAs, were evaluated. Results showed Cas13 family preferences in target ssDNA recognition, with LbuCas13a exhibiting faster detection for some target nucleic acids and LwaCas13a exhibiting faster detection for other targets

[0731] Cas13 detection of target ssDNA was robust at multiple pH values. FIG. 52 shows LbuCas13a detection assay using 1 nM target RNA (at left) or target ssDNA (at right) in buffers with various pH values ranging from 6.8 to 8.2. Reactions were performed at 37° C. for 20 minutes with RNA-FQ reporter substrates. Results indicated enhanced Cas13 RNA detection at buffers with a higher pH (7.9 to 8.2), whereas Cas13 ssDNA detection was consistent across pH conditions (6.8 to 8.2).

[0732] Cas13 preferences for target ssDNA were found to be distinct from preferences for target RNA. FIG. 53A shows guide RNAs (gRNAs) tiled along a target sequence at 1 nucleotide intervals. FIG. 53B shows LbuCas13a (SEQ ID NO: 131) detection assays using 0.1 nM RNA or 2 nM target ssDNA with gRNAs tiled at 1 nucleotide intervals and an off-target gRNA. Guide RNAs were ranked by their position along the sequence of the target nucleic acid. FIG. 53C shows data from FIG. 53B ranked by performance of target ssDNA. Results showed that gRNA performance on target ssDNA did not correlate with the performance of the same gRNAs on RNA. FIG. 53D shows performance of gRNAs for each nucleotide on a 3′ end of a target RNA. Results indicated that there are high performing gRNAs on target RNAs regardless of target nucleotide identity at this position. FIG. 53E shows performance of gRNAs for each nucleotide on a 3′ end of a target ssDNA. Results indicated that a G in the target at this position performed worse than other gRNAs.

[0733] Cas13a detected target DNA generated by nucleic acid amplification methods (PCR, LAMP). FIG. 54A shows LbuCas13a (SEQ ID NO: 131) detection assays using 1 μL of target DNA amplicon from various LAMP isothermal nucleic acid amplification reactions. LAMP conditions tested included 6-primer with both loop-forward (LF) and loop-reverse (LB), asymmetric LAMP with LF only, and asymmetric LAMP with LB only. All tested LAMP reactions generated an LbuCas13a compatible target DNA. FIG. 54B shows LbuCas13a (SEQ ID NO: 131) detection assays using various amounts of PCR reaction as a target DNA. Results indicated that PCR generated enough target ssDNA to enable Cas13 detection.

### Example 25

### Layouts and Workflows for DETECTR Reactions

[0734] This example describes assay layouts and workflows for DETECTR reactions. An assay is provided that comprises separate chambers for amplification and reverse transcription versus a programmable nuclease-based detection assay. The programmable nuclease is a Cas12, Cas13, or Cas14. The sample is a biofluid collected by a swab and inserted into a swab collection reservoir. The biofluid sample is tested for the presence of a target nucleic acid from an influenza virus. A pump drives the fluidics in the assay moving sample from chamber to chamber. A detectable signal is colorimetric, fluorescence-based, electrochemical and/or generated using an enzyme (e.g., invertase).

[0735] FIG. 55A shows a schematic of a pneumatic valve device. A pipette pump aspirates and dispenses samples. An air manifold is connected to a pneumatic pump to open and close the normally closed valve. The pneumatic device moves fluid from one position to the next and isolates unused parts of the system. The pneumatic design has reduced channel cross talk compared to other devices. FIG. 55B shows a schematic of a cartridge for use in the pneumatic valve device. The normally closed valves (one such valve is indicated by an arrow) comprise an elastomeric seal on top of the channel to isolate each chamber from the rest of the system when the chamber is not in use. The pneumatic pump uses air to open and close the valve as needed to move fluid to the necessary chambers within the cartridge. The cartridge is able to incorporate multiple different sample media. The cartridge can accommodate lysis buffer volumes of 200 μL and perform incubation steps, for example, a 10 minute incubation. The cartridge accommodates aspiration of two 2 μL samples from up to four amplification chambers. The two samples can be dispensed into the corresponding detection chambers with limited cross contamination between amplification chambers or detection chambers. The cartridge accommodates transfer of 1-2 μL of lysed sample from the sample input chamber to an amplification chamber. The cartridge may comprise up to four amplification chambers, with two detection chambers per amplification chamber, for a total of up to eight detection chambers. Each DETECTR chamber may be imaged, for example by a spectrometer. As shown in FIG. 55 and illustrated in FIG. 56, the cartridge may have two amplification chambers and two detection chambers per amplification chamber.

[0736] FIG. 56 shows a valve circuitry layout for the pneumatic valve device. The biofluid sample is placed in the sample well while all valves are closed, as shown at (i.). The sample is lysed in the sample well. The lysed sample is moved from the sample chamber to a second chamber by opening the first quake valve, as shown at (ii.), and aspirating the sample using the pipette pump. The sample is then moved to the first amplification chamber by closing the first quake valve and opening a second quake valve, as shown at (iii.) where it is mixed with the amplification mixture. After the sample is mixed with the amplification mixture, it is moved to a subsequent chamber by closing the second quake valve and opening a third quake valve, as shown at (iv). The sample is moved to the detection chamber by closing the quick third valve and opening a quick fourth valve, as shown at (v). The detection chamber comprises the programmable nuclease. If a target nucleic acid is present in the sample, a detectable signal may be produced. The detectable signal may be imaged in the detection chamber. The sample can be moved through a different series of chambers by opening and closing a different series of quake valves, as shown at (vi). Actuation of individual valves in the desired chamber series prevents cross contamination between channels.

[0737] FIG. 59 shows a schematic of the top layer of a cartridge of a pneumatic valve device of the present disclosure, highlighting suitable dimensions. The schematic shows one cartridge that is 2 inches by 1.5 inches. FIG. 60 shows a schematic of a modified top layer of a cartridge of a pneumatic valve device of the present disclosure adapted for electrochemical dimension. In this schematic, three lines are shown in the detection chambers (4 chambers at the very right). These three lines represent wiring (or “metal leads”), which is co-molded, 3D-printed, or manually assmpled in the disposable cartridge to form a three-electrode system. Electrodes are termed as working, counter, and reference. Electrodes can also be screen-printed on the cartridges. Metals used can be carbon, gold, platinum, or silver.

### Example 26

### Primer Design for Combined LAMP and DETECTR Reactions

[0738] This example describes primer design for combined LAMP and DETECTR reactions for amplification and detection of a target nucleic acid, as provided herein. Strategies for designing primers for use in combined LAMP and DETECTR reactions were tested and evaluated for multiple target nucleic acids. From these experiments, a set of design guidelines was determined to facilitate combined LAMP and DETECTR reactions for DNA nucleic acid targets or RT-LAMP and DETECTR reactions for RNA nucleic acid targets.

[0739] FIG. 61 shows a scheme for designing primers for loop mediated isothermal amplification (LAMP) of a target nucleic acid sequence. LAMP generates concatemer amplicons, comprising the target nucleic acid sequence, that form from nucleic acid loops during amplification. To generate the loops, LAMP may use from four to six primers, including the forward outer primer, the backward outer primer, the forward inner primer, the backward inner primer, optionally a loop forward primer, and optionally a loop backward primer.

[0740] FIG. 62 shows schematics of exemplary configurations of various regions of the nucleic acid sequence that correspond to or anneal LAMP primers, guide RNA sequences, protospacer-adjacent motif (PAM) or protospacer flanking site (PFS), and target nucleic acid sequences for amplification and detection by LAMP and DETECTR.

[0741] FIG. 62A shows a schematic of an exemplary arrangement of the guide RNA (gRNA) with respect to the various regions of the nucleic acid sequence that correspond to or anneal LAMP primers. In this arrangement, the guide RNA is reverse complementary to a sequence of the target nucleic acid, which is between an F1c region and a B1 region.

[0742] FIG. 62B shows a schematic of an exemplary arrangement of the guide RNA sequence with respect to the various regions of the nucleic acid sequence that correspond to or anneal LAMP primers. In this arrangement, the guide RNA is partially reverse complementary to a sequence of the target nucleic acid, which is between an F1c region and a B1 region. For example, the target nucleic acid comprises a sequence between an F1c region and a B1 region that is reverse complementary to at least 60% of a guide nucleic acid. In this arrangement, the guide RNA is not reverse complementary to the forward inner primer or the backward inner primer shown in FIG. 61.

[0743] FIG. 62C shows a schematic of an exemplary arrangement of the guide RNA with respect to the various regions of the nucleic acid sequence that correspond to or anneal LAMP primers. In this arrangement, the guide RNA hybridizes to a sequence of the target nucleic acid, which is within the loop region between the B1 region and the B2 region. The primer sequences do not contain and are not reverse complementary to the PAM or PFS.

[0744] FIG. 62D shows a schematic of an exemplary arrangement of the guide RNA with respect to the various regions of the nucleic acid sequence that correspond to or anneal LAMP primers. In this arrangement, the guide RNA hybridizes to a sequence of the target nucleic acid, which is within the loop region between the F2c region and F1c region. The primer sequences do not contain and are not reverse complementary to the PAM or PFS.

[0745] Primer sets and guide RNAs for combined LAMP and DETECTR reactions were tested for their sensitivity and specificity to detect the presence of a target nucleic acid in a sample. DETECTR signal, measured as raw fluorescence, was measured for each LAMP primer set with each of three guide RNAs designed for the specific LAMP primer set. DETECTR signal was measured in a sample containing 10000 copies of a target nucleic acid sequence and a sample containing zero copies of a target nucleic acid sequence (negative control) for each LAMP primer and guide RNA pair.

[0746] FIG. 63 shows schematics of exemplary configurations of various regions of the nucleic acid sequence that correspond to or anneal LAMP primers, guide RNA sequences, protospacer-adjacent motif (PAM) or protospacer flanking site (PFS), and target nucleic acid sequences for combined LAMP and DETECTR for amplification and detection, respectively. At the right, the schematics also show corresponding fluorescence data using the and guide RNA sequences to detect the presence of a target nucleic acid sequence, following amplification of the target nucleic acid using the LAMP amplification, where a fluorescence signal is the output of the DETECTR reaction and indicates presence of the target nucleic acid. Sequences and arrangements of the regions that correspond to or anneal LAMP primers, guide RNA sequences, protospacer-adjacent motif (PAM) or protospacer flanking site (PFS), and target nucleic acid sequences are illustrated in FIG. 64A-FIG. 64C. Three exemplary guide RNAs (gRNA1 (SEQ ID NO: 271), gRNA2 (SEQ ID NO: 272), and gRNA3 (SEQ ID NO: 273)) were tested in each primer configuration. Fluorescence signal from the DETECTR reactions, indicative of detection of a target nucleic acid, measured for each of the three guide RNAs was compared for two samples, one containing the target nucleic acid sequence (1000 genome copies per reaction) and a negative control (0 genome copies per reaction) that does not contain the target nucleic acid sequence. Sequences of the gRNAs and the primers are shown below in TABLE 13.

TABLE 13
Exemplary LAMP Primer and DETECTR gRNA Sets

| SEQ ID NO: | Name | Sequence |
|---|---|---|
| SEQ ID NO: 211 | IAV-MP-set5-F3 | GCGAAAGCAGGTAGATATTGA |
| SEQ ID NO: 259 | IAV-MP-set5-F2 | ATGAGTCTTCTAACCGAGGT |
| SEQ ID NO: 215 | IAV-MP-set5-LF | TGACGGGACGATAGAGAGAA |
| SEQ ID NO: 260 | IAV-MP-set5-F1c | TTCAAGTCTCTGCGCGATCTC |
| SEQ ID NO: 261 | IAV-MP-set5-B1c | TTGAGGCTCTCATGGAATGGC |
| SEQ ID NO: 216 | IAV-MP-set5-LB | ACAAGACCAATCCTGTCACC |
| SEQ ID NO: 262 | IAV-MP-set5-B2 | AGCGTGAACACAAATCCTAA |
| SEQ ID NO: 212 | IAV-MP-set5-B3 | CATTCCCATTGAGGGCATT |
| SEQ ID NO: 220 | IAV-MP-set8-F3 | TCTTCTAACCGAGGTCGAA |
| SEQ ID NO: 263 | IAV-MP-set8-F2 | GAAGATGTCTTTGCAGGGAA |
| SEQ ID NO: 224 | IAV-MP-set8-LF | ATTCCATGAGAGCCTCAAGATC |
| SEQ ID NO: 264 | IAV-MP-set8-F1c | TCAGAGGTGACAGGATTGGTCT |
| SEQ ID NO: 265 | IAV-MP-set8-B1c | TTGTGTTCACGCTCACCGTG |
| SEQ ID NO: 225 | IAV-MP-set8-LB | GAGGACTGCAGCGTAGAC |
| SEQ ID NO: 212 | IAV-MP-set8-B2 | CATTCCCATTGAGGGCATT |
| SEQ ID NO: 221 | IAV-MP-set8-B3 | CTGCTCTGTCCATGTTGTT |
| SEQ ID NO: 266 | IAV-MP-set1-F3 | GACTTGAAGATGTCTTTGCA |
| SEQ ID NO: 267 | IAV-MP-set1-F2 | CAGATCTTGAGGCTCTC |
| SEQ ID NO: 268 | lAV-MP-set1-LF | GTCTTGTCTTGTCTTTAGCCA |
| SEQ ID NO: 269 | lAV-MP-set1-F1c | TTAGTCAGAGGTGACAGGATTG |
| SEQ ID NO: 265 | lAV-MP-set1-B1c | TTGTGTTCACGCTCACCGTG |
| SEQ ID NO: 198 | lAV-MP-set1-LB | CAGTGAGCGAGGACTG |
| SEQ ID NO: 270 | IAV-MP-set1-B2 | TTTGGACAAAGCGTCTACG |
| SEQ ID NO: 194 | IAV-MP-set1-B3 | TGTTGTTTGGGTCCCCATT |
| SEQ ID NO: 271 | gRNA1 | UUUGUGUUCACGCUCACCGUGCCC |
| SEQ ID NO: 272 | gRNA2 | UUUAGCCAUUCCAUGAGAGCCUCA |
| SEQ ID NO: 273 | gRNA3 | UUUGGACAAAGCGUCUACGCUGCA |

[0747] FIG. 63A shows a schematic of an arrangement of various regions of the nucleic acid sequence that correspond to or anneal LAMP primers (SEQ ID NO: 211, SEQ ID NO: 212, SEQ ID NO: 215, SEQ ID NO: 216, and SEQ ID NO: 259-SEQ ID NO: 262) and positions of three guide RNAs (gRNA1 (SEQ ID NO: 271), gRNA2 (SEQ ID NO: 272), and gRNA3 (SEQ ID NO: 273)) relative to the LAMP primers (at left). gRNA1 partially overlaps with the B2c region and is, thus, reverse complementary to a portion of the B2 region. gRNA2 overlaps with the B1 region and is, thus, reverse complementary to the B1c region. gRNA3 partially overlaps with the B3 region and partially overlaps with the B2 region and is, thus, partially reverse complementary to the B3c region and partially reverse complementary to the B2c region. The complementary regions (B1c, B2c, B3c, F1c, F2c, and F3c) are not depicted, but correspond to the regions shown in FIG. 61. At right is a graph of fluorescence from the DETECTR reaction in the presence of 10,000 genome copies (before amplification) of the target nucleic acid or 0 genome copies of the target nucleic acid. DETECTR reactions with gRNA1 and gRNA3 exhibited low fluorescence intensity, indicating low to no detection of the target nucleic acid (right). gRNA2 produced a fluorescent signal independent of the presence of the target nucleic acid due to hybridization of gRNA2 with the B1c region of the BIP and self-activation of the guide RNA. and Cas cleavage activity. Hybridization of gRNA2 with the BIP may further lead to amplification of a non-target sequence due to the formation of a primer dimer.

[0748] FIG. 63B shows a schematic of an arrangement of various regions of the nucleic acid sequence that correspond to or anneal LAMP primers (SEQ ID NO: 212, SEQ ID NO: 220, SEQ ID NO: 221, SEQ ID NO: 224, SEQ ID NO: 225, SEQ ID NO: 263-SEQ ID NO: 265) and positions of three guide RNAs (gRNA1 (SEQ ID NO: 271), gRNA2 (SEQ ID NO: 272), and gRNA3 (SEQ ID NO: 273)) relative to the LAMP primers (at left). gRNA1 overlaps with the B1c region and is, thus, reverse complementary to the B1 region. gRNA2 overlaps with the LF region and is, thus, reverse complementary to the LFc region. gRNA 3 partially overlaps with the B2 region and partially overlaps with the LBc region and is, thus, partially reverse complementary to the B2c region and is partially reverse complementary to the LB region. At right is a graph of fluorescence from the DETECTR reaction in the presence of 10,000 genome copies of the target nucleic acid or 0 genome copies of the target nucleic acid. All three guide RNAs detected the presence of the target nucleic acid in DETECTR reactions, as evidenced by a high fluorescence signal in the presence of the target nucleic acid (right). gRNA1 also produced a non-specific fluorescent signal in the absence of the target nucleic acid due to primer-dimer formation with the BIP. gRNA2 and gRNA3 did not produce a substantial non-specific fluorescent signal.

[0749] FIG. 63C shows a schematic of an arrangement of various regions of the nucleic acid sequence that correspond to or anneal LAMP primers (SEQ ID NO: 194, SEQ ID NO: 198, SEQ ID NO: 265-SEQ ID NO: 270) and positions of three guide RNAs (gRNA1 (SEQ ID NO: 271), gRNA2 (SEQ ID NO: 272), and gRNA3 (SEQ ID NO: 273)) relative to the LAMP primers (at left). gRNA1 overlaps with the B1c region and is, thus, reverse complementary to the B1 region. gRNA2 partially overlaps with the LF region and partially overlaps with the F2c region and is, thus, partially reverse complementary to the LFc region and partially reverse complementary to the F2 region. gRNA3 overlaps with the B2 and is, thus, reverse complementary to the B2c region. At right is a graph of fluorescence from the DETECTR reaction in the presence of 10,000 genome copies of the target nucleic acid or 0 genome copies of the target nucleic acid. gRNA2 and gRNA3 specifically detected the presence of the target nucleic acid in DETECTR reactions, as evidenced by a high fluorescence signal in the presence of the target nucleic acid and low fluorescence signal in the absence of the target nucleic acid (right). gRNA1 detected the presence of the target nucleic acid in a DETECTR reaction but also non-specifically produced a fluorescence signal in the absence of the target nucleic acid due to primer-dimer formation with the BIP, as evidenced by a high fluorescence signal in the presence of the target nucleic acid and a moderate fluorescence signal in the absence of the target nucleic acid.

### Example 27

### Detection of a Target Nucleic Acid with Combined LAMP and DETECTR Reactions

[0750] This example describes detection of a target nucleic acid with combined LAMP and DETECTR reactions. Ten LAMP primer sets (#1-#10) for use in RT-LAMP assays were tested for sensitivity and specificity for samples containing a target nucleic acid sequence. Detection following RT-LAMP amplification was performed using either SYTO 9 detection or DETECTR. The sequences of the LAMP primers in each primer set are provided in TABLE 14.

TABLE 14
LAMP Primers for RT-LAMP Amplification and Detection

| SEQ ID NO: | Primer Name | Primer Set | Sequence |
|---|---|---|---|
| SEQ ID NO: 148 | F3 RSV-A- | #1 | TGGAACAAGTTGTGGAGG |
| | set13 | | |
| SEQ ID NO: 149 | B3 RSV-A- | #1 | TGCAGCATCATATAGATCTTGA |
| | set13 | | |
| SEQ ID NO: 150 | FIP RSV-A- | #1 | TAGTGATGCTTTTGGGTTGTTCAAT |
| | set13 | | TGTATGAGTATGCTCAAAAATTGG |
| SEQ ID NO: 151 | BIP RSV-A- | #1 | GTGTAGTATTGGGCAATGCTGCTC |
| | set13 | | CTTGGTGTACCTCTGT |
| SEQ ID NO: 152 | LF RSV-A- | #1 | TATGGTAGAATCCTGCTTCTCC |
| | set13 | | |
| SEQ ID NO: 153 | LB RSV-A- | #1 | TGGCCTAGGCATAATGGGAGA |
| | set13 | | |
| SEQ ID NO: 154 | F3 RSV-A- | #2 | AACAAGTTGTGGAGGTGTA |
| | set14 | | |
| SEQ ID NO: 155 | B3 RSV-A- | #2 | CCATTTTCTTTGAGTTGTTCAG |
| | set14 | | |
| SEQ ID NO: 156 | FIP RSV-A- | #2 | TAGTGATGCTTTTGGGTTGTTCAA |
| | set14 | | GAGTATGCTCAAAAATTGGGTG |
| SEQ ID NO: 157 | BIP RSV-A- | #2 | GTATTGGGCAATGCTGCTGGCATA |
| | set14 | | TAGATCTTGATTCCTTGGTG |
| SEQ ID NO: 158 | LF RSV-A- | #2 | ATATGGTAGAATCCTGCTTCTC |
| | set14 | | |
| SEQ ID NO: 159 | LB RSV-A- | #2 | CCTAGGCATAATGGGAGAATAC |
| | set14 | | |
| SEQ ID NO: 154 | F3 RSV-A- | #3 | AACAAGTTGTGGAGGTGTA |
| | set15 | | |
| SEQ ID NO: 155 | B3 RSV-A- | #3 | CCATTTTCTTTGAGTTGTTCAG |
| | set15 | | |
| SEQ ID NO: 160 | FIP RSV-A- | #3 | ATAGTGATGCTTTTGGGTTGTTCA |
| | set15 | | AGTATGCTCAAAAATTGGGTG |
| SEQ ID NO: 161 | BIP RSV-A- | #3 | GCTGCTGGCCTAGGCATAATGCAT |
| | set15 | | CATATAGATCTTGATTCCTT |
| SEQ ID NO: 380 | LF RSV-A- | #3 | TATATGGTAGAATCCTGCTTCTC |
| | set15 | | |
| SEQ ID NO: 162 | LB RSV-A- | #3 | GGGAGAATACAGAGGTACAC |
| | set15 | | |
| SEQ ID NO: 163 | F3 RSV-A- | #4 | GGGTCTTAGCAAAATCAGTT |
| | set16 | | |
| SEQ ID NO: 149 | B3 RSV-A- | #4 | TGCAGCATCATATAGATCTTGA |
| | set16 | | |
| SEQ ID NO: 164 | FIP RSV-A- | #4 | GAATCCTGCTTCTCCACCCAATTG |
| | set16 | | ACACGCTAGTGTACAAGC |
| SEQ ID NO: 151 | BIP RSV-A- | #4 | GTGTAGTATTGGGCAATGCTGCTC |
| | set16 | | CTTGGTGTACCTCTGT |
| SEQ ID NO: 165 | LF RSV-A- | #4 | CCTCCACAACTTGTTCCATTTCT |
| | set16 | | |
| SEQ ID NO: 166 | LB RSV-A- | #4 | TGGCCTAGGCATAATGGGAG |
| | set16 | | |
| SEQ ID NO: 167 | F3 RSV-A- | #5 | AAGCAGAAATGGAACAAGTT |
| | set17 | | |
| SEQ ID NO: 155 | B3 RSV-A- | #5 | CCATTTTCTTTGAGTTGTTCAG |
| | set17 | | |
| SEQ ID NO: 168 | FIP RSV-A- | #5 | TAGTGATGCTTTTGGGTTGTTCAGT |
| | set1l7 | | GGAGGTGTATGAGTATGC |
| SEQ ID NO: 169 | BIP RSV-A- | #5 | GTAGTATTGGGCAATGCTGCTGAT |
| | set17 | | ATAGATCTTGATTCCTTGGTG |
| SEQ ID NO: 170 | LF RSV-A- | #5 | TGCTTCTCCACCCAATTTTTGA |
| | set17 | | |
| SEQ ID NO: 171 | LB RSV-A- | #5 | GCCTAGGCATAATGGGAGAATAC |
| | set17 | | |
| SEQ ID NO: 163 | F3 RSV-A- | #6 | GGGTCTTAGCAAAATCAGTT |
| | set18 | | |
| SEQ ID NO: 149 | B3 RSV-A- | #6 | TGCAGCATCATATAGATCTTGA |
| | set18 | | |
| SEQ ID NO: 172 | FIP RSV-A- | #6 | GAATCCTGCTTCTCCACCCAGACA |
| | set18 | | CGCTAGTGTACAAGC |
| SEQ ID NO: 151 | BIP RSV-A- | #6 | GTGTAGTATTGGGCAATGCTGCTC |
| | set18 | | CTTGGTGTACCTCTGT |
| SEQ ID NO: 165 | LF RSV-A- | #6 | CCTCCACAACTTGTTCCATTTCT |
| | set18 | | |
| SEQ ID NO: 166 | LB RSV-A- | #6 | TGGCCTAGGCATAATGGGAG |
| | set18 | | |
| SEQ ID NO: 173 | F3 RSV-A- | #7 | TACACAGCTGCTGTTCAA |
| | set19 | | |
| SEQ ID NO: 174 | B3 RSV-A- | #7 | GGTAAATTTGCTGGGCATT |
| | set19 | | |
| SEQ ID NO: 175 | FIP RSV-A- | #7 | TTGGAACATGGGCACCCATAAATG |
| | set19 | | TCCTAGAAAAAGACGATG |
| SEQ ID NO: 176 | BIP RSV-A- | #7 | CTAGTGAAACAAATATCCACACCC |
| | set19 | | AGCACTGCACTTCTTGAGTT |
| SEQ ID NO: 177 | LF RSV-A- | #7 | TTGTAAGTGATGCAGGAT |
| | set19 | | |
| SEQ ID NO: 178 | LB RSV-A- | #7 | AGGGACCCTCATTAAGAGTCATG |
| | set19 | | |
| SEQ ID NO: 179 | F3 RSV-A- | #8 | ATACACAGCTGCTGTTCA |
| | set20 | | |
| SEQ ID NO: 174 | B3 RSV-A- | #8 | GGTAAATTTGCTGGGCATT |
| | set20 | | |
| SEQ ID NO: 180 | FIP RSV-A- | #8 | TCTGCTGGCATGGATGATTGAATG |
| | set20 | | TCCTAGAAAAAGACGATG |
| SEQ ID NO: 176 | BIP RSV-A- | #8 | CTAGTGAAACAAATATCCACACCC |
| | set20 | | AGCACTGCACTTCTTGAGTT |
| SEQ ID NO: 181 | LF RSV-A- | #8 | CCCATATTGTAAGTGATGCAGGAT |
| | set20 | | |
| SEQ ID NO: 182 | LB RSV-A- | #8 | AGGGACCCTCATTAAGAGTCAT |
| | set20 | | |
| SEQ ID NO: 179 | F3 RSV-A- | #9 | ATACACAGCTGCTGTTCA |
| | set21 | | |
| SEQ ID NO: 183 | B3 RSV-A- | #9 | TGGTAAATTTGCTGGGCAT |
| | set21 | | |
| SEQ ID NO: 180 | FIP RSV-A- | #9 | TCTGCTGGCATGGATGATTGAATG |
| | set21 | | TCCTAGAAAAAGACGATG |
| SEQ ID NO: 184 | BIP RSV-A- | #9 | TGAAACAAATATCCACACCCAAGG |
| | set21 | | GCACTGCACTTCTTGAGTT |
| SEQ ID NO: 185 | LF RSV-A- | #9 | CCATATTGTAAGTGATGCAGGAT |
| | set21 | | |
| SEQ ID NO: 186 | LB RSV-A- | #9 | GACCCTCATTAAGAGTCATGAT |
| | set21 | | |
| SEQ ID NO: 187 | F3 RSV-A- | #10 | AACATACGTGAACAAACTTCA |
| | set22 | | |
| SEQ ID NO: 188 | B3 RSV-A- | #10 | GCACATATGGTAAATTTGCTGG |
| | set22 | | |
| SEQ ID NO: 189 | FIP RSV-A- | #10 | ACCCATATTGTAAGTGATGCAGGA |
| | set22 | | TAGGGCTCCACATACACAG |
| SEQ ID NO: 190 | BIP RSV-A- | #10 | CTAGTGAAACAAATATCCACACCC |
| | set22 | | AAGCACTGCACTTCTTGAG |
| SEQ ID NO: 191 | LF RSV-A- | #10 | TTTCTAGGACATTGTATTGAACAG |
| | set22 | | C |
| SEQ ID NO: 192 | LB RSV-A- | #10 | GGGACCCTCATTAAGAGTCATG |
| | set22 | | |

[0751] FIG. 65 shows the times to result of a reverse-transcription LAMP (RT-LAMP) reaction detected using a DNA binding dye. LAMP amplification, measured by an increase in SYTO 9 fluorescence, was observed over time, and time to result was determined as the time to reach half maximum SYTO 9 fluorescence intensity. Time to result was compared for ten LAMP primer sets in the presence (1000 genome copies) or absence (0 genome copies) of a target sequence from an RNA virus. Primer sets, namely #1 (SEQ ID NO: 148-SEQ ID NO: 153), #7 (SEQ ID NO: 173-SEQ ID NO: 178), #8 (SEQ ID NO: 174, SEQ ID NO: 176, and SEQ ID NO: 179-SEQ ID NO: 182), and #10 (SEQ ID NO: 187-SEQ ID NO: 192), showed clear differentiation between a sample containing the target sequence and a negative control lacking the target sequence. A decreased time to result is indicative of a sample positive for the target nucleic acid sequence.

[0752] FIG. 66 shows fluorescence signal from a DETECTR reaction using a Cas 12 variant (SEQ ID NO: 37) following a five-minute incubation with products from RT-LAMP reactions. LAMP primer sets #1-6 were designed for use with guide RNA #2 (SEQ ID NO: 250), and LAMP primer sets #7-10 were designed for use with guide RNA #1 (SEQ ID NO: 249). Sequences of primers in each primer set are provided in TABLE 14. DETECTR signal was compared for each LAMP primer set in the presence (1000 genome copies) or absence (0 genome copies) of a target sequence using either a guide RNA having a sequence corresponding to SEQ ID NO: 249 (guide RNA#1, top bar graph) or guide RNA having a sequence corresponding to SEQ ID NO: 250 (guide RNA #2, bottom bar graph). Data shows clean differentiation between reactions with the target sequence and no target control reactions when using DETECTR to differentiate between specific and non-specific LAMP amplification. The sequences of the gRNAs used in the DETECTR reaction are provided in TABLE 15.

TABLE 15
DETECTR gRNAs for RT-LAMP Amplification with DETECTR

| SEQ ID NO: | gRNA Name | Sequence |
|---|---|---|
| SEQ ID NO: 249 | gRNA #1 (R1118) | UAAUUUCUACUAAGUGUAGAUCUUAUAA |
| | | AAGAACUAGCCAA |
| SEQ ID NO: 250 | gRNA #2 (R288) | UAAUUUCUACUAAGUGUAGAUACUCAAUU |
| | | UCCUCACUUCUC |

### Example 28

### Detection of Influenza A and B Virus using RT-LAMP and SYTO9

[0753] This example describes detection of influenza A and B virus using LAMP and SYTO9. Samples containing either 0, 100, 1000, 10,000, or 100,000 copies of an influenza A virus (IAV) or 0, 100, 1000, 10,000, or 100,000 copies of an influenza B virus (IBV) target nucleic acid sequence were subjected to RT-LAMP amplification using different sets of LAMP primers. Sets of LAMP primers (1, 2, 4, 5, 6, 7, 8, 9, 10, 11, or a negative control) were compared for their ability to specifically amplify the target nucleic acid sequence. Amplification was measured as a time to result using SYTO9. A decreased time to result is indicative of a sample positive for the target nucleic acid sequence.

[0754] Each reaction RT-LAMP reaction was performed in the presence of 1× NEB IsoAmp Buffer, 4.5 mM MgSO₄, 6.4 U/μL Bst 2.0 (NEB), 0.75 μL Warmstart RTx reverse transcriptase, 1 μL 10×0 primer mix, and 0.2 μL SYTO9 per 10 μL reaction in nuclease free water.

[0755] FIG. 67 shows detection of sequences from influenza A virus (IAV) using SYTO 9 (a DNA binding dye) following RT-LAMP amplification with LAMP primer sets 1, 2, 4, 5, 6, 7, 8, 9, 10, 11, or a negative control. Ten reactions were performed per primer set and reactions were performed in duplicate. Individual plots depict fluorescence intensity over time during the LAMP amplification reaction. Fluorescence from SYTO 9 was measured over time as a function of an amount of target sequence present in the reaction. Plots in rows show amplification in the presence of, from top to bottom, 0, 100, 1000, 10,000, or 100,000 copies of the target nucleic acid. Plots in columns show amplification using, from left to right, primer sets 1, 2, IBV, 4, 5, 6, 7, 8, 9, 10, and 11. Primer set 1 (SEQ ID NO: 193-SEQ ID NO: 198) shows a flat negative control curve, indicating suitability for use in LAMP amplification reactions. Primer set 2 (SEQ ID NO: 199-SEQ ID NO: 204) is well-suited for use in amplifying a target nucleic acid using LAMP. Primer set 8 (SEQ ID NO: 220-SEQ ID NO: 225) and primer set 10 (SEQ ID NO: 221, SEQ ID NO: 223-SEQ ID NO: 225, and SEQ ID NO: 229-SEQ ID NO: 230) also work well in amplifying a target nucleic acid using LAMP. Primer set 8 produces a lower negative control amplification signal than primer set 10.

[0756] FIG. 69 shows the time to amplification of an IAV target sequence following LAMP amplification with different primer sets as determined from the SYTO 9 fluorescence traces shown in FIG. 67. Time to result was determined as the time to reach half maximum SYTO 9 fluorescence intensity. Amplification was detected using SYTO9 in the presence of increasing concentrations of target sequence (0, 100, 1000, 10,000, or 100,000 genome copies of the target sequence per reaction). The assay was capable of distinguishing between negative control reactions (no target sequence) and reactions containing 100,000 genome copies of the target sequence for all primer sets. The sequences of the LAMP primers in each primer set are provided in TABLE 16.

TABLE 16
Primers for Amplification and Detection of IAV and IBV Virus using RT-LAMP

| SEQ ID NO: | Primer Name | Primer Set | Sequence |
|---|---|---|---|
| SEQ ID NO: 193 | IAV-MP-F3 | #1 | GACTTGAAGATGTCTTTGC |
| SEQ ID NO: 194 | IAV-MP B3 | #1 | TGTTGTTTGGGTCCCCATT |
| SEQ ID NO: 195 | IAV-MP-FIP | #1 | TTAGTCAGAGGTGACAGGATTGC |
| | | | AGATCTTGAGGCTCTC |
| SEQ ID NO: 196 | IAV-MP-BIP | #1 | TTGTGTTCACGCTCACCGTGTTTG |
| | | | GACAAAGCGTCTACG |
| SEQ ID NO: 197 | IAV-MP FL | #1 | GTCTTGTCTTTAGCCA |
| SEQ ID NO: 198 | IAV-MP BL | #1 | CAGTGAGCGAGGACTG |
| SEQ ID NO: 199 | IAV F3 v2 | #2 | ACCGAGGTCGAAACGT |
| SEQ ID NO: 200 | IAV B3 v2 | #2 | GGTCCCCATTCCCATTG |
| SEQ ID NO: 201 | IAV FIP v2 | #2 | CAAAGACATCTTCAAGTCTCTGCG |
| | | | TTTTTTCTCTCTATCGTCCCGTCA |
| SEQ ID NO: 202 | IAV BIP v2 | #2 | AATGGCTAAAGACAAGACCAATC |
| | | | CTTTTTTGTCTACGCTGCAGTCC |
| SEQ ID NO: 203 | IAV LF v2 | #2 | CGATCTCGGCTTTGAGGG |
| SEQ ID NO: 204 | IAV LB v2 | #2 | TCACCGTGCCCAGTGAG |
| SEQ ID NO: 205 | IAV F3 v3 | #3 | CGAAAGCAGGTAGATATTGAAAG |
| SEQ ID NO: 206 | IAV B3 v3 | #3 | TCTACGCTGCAGTCCTC |
| SEQ ID NO: 207 | IAV FIP v3 | #3 | TCAAGTCTCTGCGCGATCTCTTTT |
| | | | TTGAGTCTTCTAACCGAGGT |
| SEQ ID NO: 208 | IAV BIP v3 | #3 | AGATGTCTTTGCAGGGAAAAACA |
| | | | CTTTTTTCACAAATCCTAAAATCC |
| | | | CCTTAG |
| SEQ ID NO: 209 | IAV LF v3 | #3 | GACGATAGAGAGAACGTACGTTT |
| | | | C |
| SEQ ID NO: 210 | IAV LB v3 | #3 | AAGACCAATCCTGTCACCTCT |
| SEQ ID NO: 211 | IAV-set4-F3 | #4 | GCGAAAGCAGGTAGATATTGA |
| SEQ ID NO: 212 | IAV-set4-B3 | #4 | CATTCCCATTGAGGGCATT |
| SEQ ID NO: 213 | IAV-set4-FIP | #4 | CTTCAAGTCTCTGCGCGATCTATG |
| | | | AGTCTTCTAACCGAGGT |
| SEQ ID NO: 214 | IAV-set4-BIP | #4 | TTGAGGCTCTCATGGAATGGCAG |
| | | | CGTGAACACAAATCCTAA |
| SEQ ID NO: 215 | IAV-set4-LF | #4 | TGACGGGACGATAGAGAGAA |
| SEQ ID NO: 216 | IAV-set4-LB | #4 | ACAAGACCAATCCTGTCACC |
| SEQ ID NO: 211 | IAV-set5-F3 | #5 | GCGAAAGCAGGTAGATATTGA |
| SEQ ID NO: 212 | IAV-set5-B3 | #5 | CATTCCCATTGAGGGCATT |
| SEQ ID NO: 217 | IAV-set5-FIP | #5 | TTCAAGTCTCTGCGCGATCTCATG |
| | | | AGTCTTCTAACCGAGGT |
| SEQ ID NO: 214 | IAV-set5-BIP | #5 | TTGAGGCTCTCATGGAATGGCAG |
| | | | CGTGAACACAAATCCTAA |
| SEQ ID NO: 215 | IAV-set5-LF | #5 | TGACGGGACGATAGAGAGAA |
| SEQ ID NO: 216 | IAV-set5-LB | #5 | ACAAGACCAATCCTGTCACC |
| SEQ ID NO: 211 | IAV-set6-F3 | #6 | GCGAAAGCAGGTAGATATTGA |
| SEQ ID NO: 218 | IAV-set6-B3 | #6 | TTGGACAAAGCGTCTACG |
| SEQ ID NO: 213 | IAV-set6-FIP | #6 | CTTCAAGTCTCTGCGCGATCTATG |
| | | | AGTCTTCTAACCGAGGT |
| SEQ ID NO: 214 | IAV-set6-BIP | #6 | TTGAGGCTCTCATGGAATGGCAG |
| | | | CGTGAACACAAATCCTAA |
| SEQ ID NO: 215 | IAV-set6-LF | #6 | TGACGGGACGATAGAGAGAA |
| SEQ ID NO: 216 | IAV-set6-LB | #6 | ACAAGACCAATCCTGTCACC |
| SEQ ID NO: 211 | IAV-set7-F3 | #7 | GCGAAAGCAGGTAGATATTGA |
| SEQ ID NO: 212 | IAV-set7-B3 | #7 | CATTCCCATTGAGGGCATT |
| SEQ ID NO: 219 | IAV-set7-FIP | #7 | AAGTCTCTGCGCGATCTCGATGA |
| | | | GTCTTCTAACCGAGGT |
| SEQ ID NO: 214 | IAV-set7-BIP | #7 | TTGAGGCTCTCATGGAATGGCAG |
| | | | CGTGAACACAAATCCTAA |
| SEQ ID NO: 215 | IAV-set7-LF | #7 | TGACGGGACGATAGAGAGAA |
| SEQ ID NO: 216 | IAV-set7-LB | #7 | ACAAGACCAATCCTGTCACC |
| SEQ ID NO: 220 | IAV-set8-F3 | #8 | TCTTCTAACCGAGGTCGAA |
| SEQ ID NO: 221 | IAV-set8-B3 | #8 | CTGCTCTGTCCATGTTGTT |
| SEQ ID NO: 222 | IAV-set8-FIP | #8 | TCAGAGGTGACAGGATTGGTCTG |
| | | | AAGATGTCTTTGCAGGGAA |
| SEQ ID NO: 223 | IAV-set8-BIP | #8 | TTGTGTTCACGCTCACCGTCATTC |
| | | | CCATTGAGGGCATT |
| SEQ ID NO: 224 | IAV-set8-LF | #8 | ATTCCATGAGAGCCTCAAGATC |
| SEQ ID NO: 225 | IAV-set8-LB | #8 | GAGGACTGCAGCGTAGAC |
| SEQ ID NO: 226 | IAV-set9-F3 | #9 | TTCTCTCTATCGTCCCGTC |
| SEQ ID NO: 221 | IAV-set9-B3 | #9 | CTGCTCTGTCCATGTTGTT |
| SEQ ID NO: 227 | IAV-set9-FIP | #9 | CCCTTAGTCAGAGGTGACAGGAA |
| | | | CACAGATCTTGAGGCTCT |
| SEQ ID NO: 223 | IAV-set9-BIP | #9 | TTGTGTTCACGCTCACCGTCATTC |
| | | | CCATTGAGGGCATT |
| SEQ ID NO: 228 | IAV-set9-LF | #9 | GGTCTTGTCTTTAGCCATTCCA |
| SEQ ID NO: 225 | IAV-set9-LB | #9 | GAGGACTGCAGCGTAGAC |
| SEQ ID NO: 229 | IAV-set10-F3 | #10 | GTCTTCTAACCGAGGTCGA |
| SEQ ID NO: 221 | IAV-set10-B3 | #10 | CTGCTCTGTCCATGTTGTT |
| SEQ ID NO: 230 | IAV-set10-FIP | #10 | GAGGTGACAGGATTGGTCTTGTT |
| | | | GAAGATGTCTTTGCAGGG |
| SEQ ID NO: 223 | IAV-set10-BIP | #10 | TTGTGTTCACGCTCACCGTCATTC |
| | | | CCATTGAGGGCATT |
| SEQ ID NO: 224 | IAV-set10-LF | #10 | ATTCCATGAGAGCCTCAAGATC |
| SEQ ID NO: 225 | IAV-set10-LB | #10 | GAGGACTGCAGCGTAGAC |
| SEQ ID NO: 231 | IAV-set11-F3 | #11 | AAGAAGACAAGAGATATGGC |
| SEQ ID NO: 232 | IAV-set11-B3 | #11 | CAATTCGACACTAATTGATGGC |
| SEQ ID NO: 233 | IAV-set11-FIP | #11 | GTCTCCTTGCCCAATTAGCAAGCA |
| | | | TCAATGAACTGAGCA |
| SEQ ID NO: 234 | IAV-set11-BIP | #11 | GTGGTGTTGGTAATGAAACGAAG |
| | | | CTGTCTGGCTGTCAGTA |
| SEQ ID NO: 235 | IAV-set11-LF | #11 | ACATTAGCCTTCTCTCCTTT |
| SEQ ID NO: 236 | IAV-set11-LB | #11 | AACGGGACTCTAGCATACT |
| SEQ ID NO: 237 | M605 F3 IBV | IBV | AGGGACATGAACAACAAAGA |
| | LAMP | | |
| SEQ ID NO: 238 | M606 B3 IBV | IBV | CAAGTTTAGCAACAAGCCT |
| | LAMP | | |
| SEQ ID NO: 239 | M607 FIP IBV | IBV | TCAGGGACAATACATTACGCATA |
| | LAMP | | TCGATAAAGGAGGAAGTAAACAC |
| | | | TCA |
| SEQ ID NO: 240 | M608 BIP IBV | IBV | TAAACGGAACATTCCTCAAACAC |
| | LAMP | | CACTCTGGTCATATGCATTC |
| SEQ ID NO: 241 | M609 LF IBV | IBV | TCAAACGGAACTTCCCTTCTTTC |
| | LAMP | | |
| SEQ ID NO: 242 | M610 LB IBV | IBV | GGATACAAGTCCTTATCAACTCTG |
| | LAMP | | C |

[0757] FIG. 68 shows the time to amplification of an influenza B virus (IBV) target sequence following RT-LAMP amplification. Amplification was detected using SYTO9 in the presence of increasing concentrations of the target nucleic acid sequence (0, 100, 1000, 10,000, or 100,000 genome copies of the target sequence per reaction). RT-LAMP amplification was performed using primer set #8 (SEQ ID NO: 220-SEQ ID NO: 225), provided in TABLE 16.

### Example 29

### Detection of Influenza A Virus using LAMP and DETECTR

[0758] This example describes detection of influenza A virus using LAMP and DETECTR. Samples containing an influenza A virus (IAV) target nucleic acid sequence or lacking the IAV target nucleic acid sequence were subjected to RT-LAMP amplification using different sets of LAMP primers. Sets of LAMP primers were compared for their ability to specifically amplify the target nucleic acid sequence. Presence or absence of the target nucleic acid in the sample was subsequently measured using DETECTR. DETECTR signal, measured by an increase in fluorescent signal upon activation of a programmable nuclease, was observed over time. An increase in fluorescence indicates the presence of the target nucleic acid sequence.

[0759] Each RT-LAMP reaction was performed in the presence of 1× NEB IsoAmp Buffer, 4.5 mM MgSO₄, 1.4 mM dNTPs (NEB), 6.4 U/μL Bst 2.0 (NEB), 1.5 μL Warmstart RTx, and 2 μL 10× primer mix per 20 μL reaction in nuclease-free water. Each DETECTR reaction was performed in the presence of lx Processing Buffer, 250 nM crRNA, and 200 nM Sr-WT LbCas12a (SEQ ID NO: 27) programmable nuclease in nuclease-free water.

[0760] FIG. 70 shows detection of target nucleic acid sequences from influenza A virus (IAV) using DETECTR following RT-LAMP amplification with LAMP primer sets 1, 2, 4, 5, 6, 7, 8, 9, 10, or a negative control. RT-LAMP amplification was performed using the primer sets provided in TABLE 16. Ten reactions were performed per primer set. DETECTR was performed with different gRNAs. The sequences of the gRNAs used in the DETECTR reaction are provided in TABLE 17. DETECTR signal was measured as a function of an amount of target sequence present in the reaction. Individual plots depict fluorescence intensity over time during DETECTR reaction following LAMP amplification. Individual traces on each plot show amplification followed by DETECTR with a guide RNA corresponding to SEQ ID NO: 251 (R283 gRNA, blue), a guide RNA corresponding to SEQ ID NO: 252 (R781 gRNA, red), a guide RNA corresponding to SEQ ID NO: 253 (R782 gRNA, green), or a guide RNA corresponding to SEQ ID NO: 254 (IBV gRNA, purple). Plots in rows show DETECTR following LAMP amplification in the presence of, from top to bottom, 0, 100, 1000, 10,000, or 100,000 copies of the target nucleic acid. Plots in columns show DETECTR following LAMP amplification using, from left to right, primer sets 1, 2, 4, 5, 6, 7, 8, 9, 10, 11, or IBV. Using primer set 1 resulted in robust amplification of the target nucleic acid by RT-LAMP. Primer set 2 was also found to be well-suited for use in combined methods of amplifying a target nucleic acid sequence by RT-LAMP and detecting the target nucleic acid sequence by DETECTR. Primer set 8 (SEQ ID NO: 220-SEQ ID NO: 225) and primer set 10 (SEQ ID NO: 221, SEQ ID NO: 223-SEQ ID NO: 225, and SEQ ID NO: 229-SEQ ID NO: 230) were well suited for use in combined RT-LAMP and DETECTR reactions when detected using the guide RNA corresponding to SEQ ID NO: 253 analyzed with R782, as indicated by robust amplification and detection of the target nucleic acid without nonspecific amplification or detection in the absence of the target nucleic acid. Target nucleic acid sequences from IBV were also detected by DETECTR after RT-LAMP amplification of the target.

TABLE 17
DETECTR gRNAs for RT-LAMP Amplification with DETECTR of IAV or IBV

| SEQ ID NO: | gRNA Name | Sequence |
|---|---|---|
| SEQ ID NO: 251 | R283 | UAAUUUCUACUAAGUGUAGAUUGUUCACG |
| | | CUCACCGUGCCC |
| SEQ ID NO: 252 | R781 | UAAUUUCUACUAAGUGUAGAUGCCAUUCC |
| | | AUGAGAGCCUCA |
| SEQ ID NO: 253 | R782 | UAAUUUCUACUAAGUGUAGAUGACAAAGC |
| | | GUCUACGCUGCA |
| SEQ ID NO: 254 | IBV (R778) | UAAUUUCUACUAAGUGUAGAUCUAACACU |
| | | CUCAGGGACAAU |

### Example 30

### Detection of a SNP using LAMP and DETECTR

[0761] This example describes detection of a SNP using LAMP and DETECTR. Strategies for designing primers for use in combined LAMP and DETECTR reactions to detect SNPs were tested and evaluated for multiple target SNPs. From these experiments, a set of design guidelines was determined to facilitate combined LAMP and DETECTR reactions for DNA nucleic acid targets or RT-LAMP and DETECTR reactions for RNA nucleic acid targets.

[0762] FIG. 71 shows a scheme for designing primers for LAMP amplification of a target nucleic acid sequence and detection of a single nucleotide polymorphism (SNP) in the target nucleic acid sequence. In an exemplary arrangement, the SNP of the target nucleic acid is positioned between the F1c region and the B1 region.

[0763] FIG. 72 shows schematics of exemplary arrangements of LAMP primers, guide RNA sequences, protospacer-adjacent motif (PAM) or protospacer flanking site (PFS), and target nucleic acids with a SNP for methods of LAMP amplification of a target nucleic acid and detection of the target nucleic acid using DETECTR.

[0764] FIG. 72A shows a schematic of an exemplary arrangement of the guide RNA with respect to various regions of the nucleic acid sequence that correspond to or anneal LAMP primers. In this arrangement, the PAM or PFS of the target nucleic acid is positioned between an F1c region and a B1 region. The entirety of the guide RNA sequence may be between the F1c region and the B1c region. The SNP is shown as positioned within a sequence of the target nucleic acid that hybridizes to the guide RNA.

[0765] FIG. 72B shows a schematic of an exemplary arrangement of the guide RNA sequence with respect to various regions of the nucleic acid sequence that correspond to or anneal LAMP primers. In this arrangement, the PAM or PFS of the target nucleic acid is positioned between an F1c region and a B1 region and the target nucleic acid comprises a sequence between an F1c region and a B1 region that is reverse complementary to at least 60% of a guide nucleic acid. In this example, the guide RNA is not reverse complementary to the forward inner primer or the backward inner primer. The SNP is shown as positioned within a sequence of the target nucleic acid that hybridizes to the guide RNA.

[0766] FIG. 72C shows a schematic of an exemplary arrangement of the guide RNA sequence with respect to various regions of the nucleic acid sequence that correspond to or anneal LAMP primers. In this arrangement, the PAM or PFS of the target nucleic acid is positioned between the F1c region and the B1 region and the entirety of the guide RNA sequence is between the F1c region and the B1 region. The SNP is shown as positioned within a sequence of the target nucleic acid that hybridizes to the guide RNA.

[0767] FIG. 73 shows an exemplary sequence of a nucleic acid comprising two PAM sites and a HERC2 SNP. The SNP is positioned at position 9 relative to a first PAM site or position 14 relative to a second PAM site.

[0768] FIG. 74 shows results from DETECTR reactions to detect a HERC2 SNP at position 9 relative to a first PAM site or position 14 relative to a second PAM site following LAMP amplification. The SNP position is indicated by a triangle. Fluorescence signal, indicative of detection of the target sequence, was measured over time in the presence of a target sequence comprising either a G SNP allele or an A SNP allele in HERC2. The target nucleic acid comprising the SNP was amplified using the primers presented in TABLE 18.

TABLE 18
LAMP Primers for Amplification and Detection of a HERC2 SNP

| SEQ ID NO: | Primer Name | Primer Set | Sequence |
|---|---|---|---|
| SEQ ID NO: 243 | M948 F3 | HERC2 | CTTGTAATCAACATCAGGGTAA |
| | HERC2 set3 | | |
| SEQ ID NO: 244 | M949 B3 | HERC2 | AGAAACGACAAGTAGACCATT |
| | HERC2 set3 | | |
| SEQ ID NO: 245 | M950 FIP | HERC2 | CGCCTCTTGGATCAGACACATGTG |
| | HERC2 set3 | | TTAATACAAAGGTACAGGA |
| SEQ ID NO: 246 | M951 BIP | HERC2 | CACGCTATCATCATCAGGGGCTG |
| | HERC2 set3 | | CTTCAAGTGTATATAAACTCAC |
| SEQ ID NO: 247 | M952 LF | HERC2 | GAGAGCCATGAAGAACAAATTCT |
| | HERC2 set3 | | |
| SEQ ID NO: 248 | M953 LB | HERC2 | CGAGGCTTCTCTTTGTTTTTAAT |
| | HERC2 set3 | | |

[0769] The target sequence was detected using a guide RNA (crRNA only) to detect either the A allele with the first PAM site (SNP Position 9, “A SNP”), the G allele with the first PAM site (SNP Position 9, “G SNP”), the A allele with the second PAM site (SNP Position 14, “A SNP”)or the G allele with the second PAM site (SNP Position 14, “G SNP”). Four guide RNAs designed for each condition were used. The guide RNAs used for the detection of the two SNP alleles relative to the two PAM sites are presented in TABLE 19. The guide RNA corresponding to SEQ ID NO: 255 was designed to detect the A allele at position 9, the guide RNA corresponding to SEQ ID NO: 256 was designed to detect the G allele at position 9, the guide RNA corresponding to SEQ ID NO: 257 was designed to detect the A allele at position 14, and the guide RNA corresponding to SEQ ID NO: 258 was designed to detect the G allele at position 14. A high fluorescence signal was detected for the G allele in the presence of the position 9 G SNP guide RNA (SEQ ID NO: 256, top left) and the A allele in the presence of the position 9 A SNP guide RNA (SEQ ID NO: 255, bottom right). Minimal fluorescence signal was detected for the G allele in the presence of the position 9 A SNP guide RNA (SEQ ID NO: 255, top right) and the position 9 A allele in the presence of the G SNP guide RNA (SEQ ID NO: 256, bottom left). This indicates that the position 9 G SNP and position 9 A SNP guide RNAs show specificity for the G allele and A allele, respectively. The position 14 A SNP guide RNA (SEQ ID NO: 257) and the position 14 G SNP guide RNA (SEQ ID NO: 258) detected both alleles, as shown by high fluorescence signal when detecting the SNP with the position 14 A SNP or G SNP guide RNAs, independent of the target sequence present.

[0770] FIG. 75 shows a heatmap of fluorescence from a DETECTR reaction following LAMP amplification of the target nucleic acid sequence. The DETECTR reaction differentiated between two HERC2 SNP alleles, using guide RNAs (crRNA only) specific for the A allele (SEQ ID NO: 255) or the G allele (SEQ ID NO: 256). Positive detection is indicated by a high fluorescence value in the DETECTR reaction. Guide RNA corresponding to SEQ ID NO: 255 was specific for A allele, as indicated by (i) a high fluorescence signal in the A SNP positive control, the HeLa sample, and Sample 2, and (ii) low fluorescence signal in the G SNP positive control, the negative control, and Sample 1. Guide RNA corresponding to SEQ ID NO: 256 was specific for G allele, as indicated by (i) a high fluorescence signal in the G SNP positive control, the HeLa sample, and Sample 1, and (ii) low fluorescence signal in the A SNP positive control, the negative control, and Sample 2. Sample 1 was homozygous for the G allele and Sample 2 was homozygous for the A allele.

TABLE 19
DETECTR Guide RNAs for Amplification and Detection of a HERC2 SNP

| SEQ ID NO: | gRNA Name | Sequence |
|---|---|---|
| SEQ ID NO: 255 | A SNP Position 9 | UAAUUUCUACUAAGUGUAGAUAGCAUUA |
| | (R570) | AAUGUCAAGUUCU |
| SEQ ID NO: 256 | G SNP Position 9 | UAAUUUCUACUAAGUGUAGAUAGCAUUA |
| | (R571) | AGUGUCAAGUUCU |
| SEQ ID NO: 257 | A SNP Position 14 | UAAUUUCUACUAAGUGUAGAUAUUUGAG |
| | (R1138) | CAUUAAAUGUCAA |
| SEQ ID NO: 258 | G SNP Position 14 | UAAUUUCUACUAAGUGUAGAUAUUUGAG |
| | (R1139) | CAUUAAGUGUCAA |

[0771] FIG. 76 shows combined LAMP amplification of a target nucleic acid by LAMP and detection of the target nucleic acid by DETECTR. Detection was carried out visually with DETECTR by illuminating the samples with a red LED. Each reaction contained a target nucleic acid sequence comprising a SNP allele for either a blue eye phenotype (“Blue Eye”) or a brown eye phenotype (“Brown Eye”). Samples “Brown *” and “Blue *” were an A allele positive control and a G allele positive control, respectively. A position 9 guide RNA for either the brown eye phenotype (SEQ ID NO: 255, “Br”) or the blue eye phenotype (SEQ ID NO: 256, “Bl”) was used for each LAMP DETECTR reaction. The presence of either the blue eye allele or the brown eye allele was visually detected by eye, as shown by an increase in fluorescence in each tube containing a target nucleic acid sequence and a corresponding guide RNA. The guide RNA for the brown eye allele (SEQ ID NO: 255) was specific for the A allele, as shown by a high fluorescence signal (brighter tubes) in tubes containing the brown eye guide RNA and either the brown eye target nucleic acid or the A SNP positive control, and low fluorescence signal (darker tubes) in tubes containing the brown eye guide RNA and either the blue eye target nucleic acid or the G SNP positive control. The guide RNA for the blue eye allele (SEQ ID NO: 256) was specific for the G allele, as shown by a high fluorescence signal (brighter tubes) in tubes containing the blue eye guide RNA and either the blue eye target nucleic acid or the G SNP positive control, and low fluorescence signal (darker tubes) in tubes containing the blue eye guide RNA and either the brown eye target nucleic acid or the A SNP positive control.

### Example 31

### RT-LAMP DETECTR Reactions for Detection of Coronavirus

[0772] This example describes RT-LAMP DETECTR reactions for the detection of coronavirus. SARS-CoV-2 target sequences were designed using all available genomes available from GISAID. Briefly, viral genomes were aligned using Clustal Omega. Next, LbCas12a target sites on the SARS-CoV-2 genome were filtered against SARS-CoV, two bat-SARS-like-CoV genomes and common human coronavirus genomes. Compatible target sites were finally compared to those used in current protocols from the CDC and WHO. LAMP primers for SARS-CoV-2 were designed against regions of the N-gene and E-gene using PrimerExplorer v5 (https://primerexplorer.jp/e/). FIG. 114A shows a sequence alignment of the target sites targeted by the N-gene gRNA for three coronavirus strains. The N gene gRNA #1 is compatible with the CDC-N2 amplicon, the N gene gRNA #2 is compatible with WHO N-Sarbeco amplicon. FIG. 114B shows a sequence alignment of the target sites targeted by the E-gene gRNA for three coronavirus strains. The two E gene gRNAs tested (E gene gRNA #1 and E gene gRNA #2) are compatible with the WHO E-Sarbeco amplicon. RNase P POP7 primers were originally published by Curtis, et al. (2018) and a compatible gRNA was designed to function with these primer sets.

[0773] Target RNAs were generated from synthetic gene fragments of the viral genes of interest. First a PCR step was performed on the synthetic gene fragment with a forward primer that contained a T7 promoter. Next, the PCR product was used as the template for an in-vitro transcription (IVT) reaction at 37° C. for 2 hours. The IVT reaction was then treated with TURBO DNase (Thermo) for 30 minutes at 37° C., followed by a heat-denaturation step at 75° C. for 15 minutes. RNA was purified using RNA Clean and Concentrator 5 columns (Zymo Research). RNA was quantified by Nanodrop and Qubit and diluted in nuclease-free water to working concentrations.

[0774] DETECTR assays were performed using RT-LAMP for pre-amplification of viral or control RNA targets and LbCas12a for the trans-cleavage assay. RT-LAMP was prepared with a MgSO₄ concentration of 6.5 mM and a final volume of 10 μL. LAMP primers were added at a final concentration of 0.2 μM for F3 and B3, 1.6 μM for FIP and BIP, and 0.8 μM for LF and LB. Reactions were performed independently for N-gene, E-gene, and RNase P using 2 μL of input RNA at 62° C. for 20 minutes.

[0775] For LbCas12a (SEQ ID NO: 27) trans-cleavage, 50 nM LbCas12a (available from NEB) was pre-incubated with 62.5 nM gRNA in 1X NEBuffer 2.1 for 30 minutes at 37° C. After formation of the RNA-protein complex, the lateral flow cleavage reporter (/56-FAM/TTATTATT/3Bio/ (SEQ ID NO: 9), IDT) was added to the reaction at a final concentration of 500 nM. RNA-protein complexes were used immediately or stored at 4° C. for up to 24 hours before use.

[0776] After completion of the pre-amplification step, 2 μL of amplicon was combined with 18 μL of LbCas12a-gRNA complex and 80 μL of 1× NEBuffer 2.1. The 100 μL LbCas12a trans-cleavage assay was allowed to proceed for 10 minutes at 37° C.

[0777] A lateral flow strip (Milenia HybriDetect 1, TwistDx) was then added to the reaction tube and a result was visualized after approximately 2-3 minutes. A single band, close to the sample application pad indicated a negative result, whereas a single band close to the top of the strip or two bands indicated a positive result.

[0778] The patient optimized DETECTR assays were performed using RT-LAMP method as described above with the following modifications: A DNA binding dye, SYTO9 (Thermo Fisher Scientific), was included in the reaction to monitor the amplification reaction and the incubation time was extended to 30 minutes to capture data from lower titre samples.

[0779] The fluorescence based patient optimized LbCas12a trans-cleavage assays were performed as described above with modifications; 40 nM LbCas12a was pre-incubated with 40 nM gRNA, after which 100 nM of a fluorescent reporter molecule compatible with detection in the presence of the SYTO9 dye (/5Alex594N/TTATTATT/3IAbRQSp/ (SEQ ID NO: 9)) was added to the complex. 2 μL of amplicon was combined with 18 μL of LbCas12a-gRNA complex in a black 384-well assay plate and monitored for fluorescence using a Tecan plate reader.

### Example 32

### Screening of Primer Sets for Amplification of a SARS-CoV-2 Target Site

[0780] This example describes the screening of primer sets for amplification of a SARS-CoV-2 target site. A region of the coronavirus RNA genome corresponding to the viral N-gene was amplified using different LAMP primer sets (sett through set 11). Samples containing either 1.5 pM, 5 fM, or 0 fM SARS-CoV-2 RNA were amplified with each primer set. SARS-CoV-2 RNA in each sample was reverse transcribed using a warmstart reverse transcriptase (“Warmstart RTx”) and LAMP amplified using a Bst 2.0 DNA polymerase. The assay was performed at 60 degrees C. for 60 minutes. FIG. 77 illustrates schematically the steps of preparing and detecting a sample using a RT-LAMP and Cas12 DETECTR reactions. FIG. 97 shows technical specifications and assay conditions for detection of coronavirus using reverse transcription and loop-mediated isothermal amplification (RT-LAMP) and Cas12 detection.

[0781] A DETECTR assay was performed on each amplified sample, and the time to result was determined. Sequences were detected using a gRNA sequence corresponding to R1763 directed to the N-gene of SARS-CoV-2 and a Cas12 programmable nuclease corresponding to LbCas12a. The DETECTR assay was sensitive for the amplified SARS-CoV-2 target sequence for all tested primer sets. Sequences of the gRNAs used in this example are provided in TABLE 20. FIG. 78 shows the DETECTR assay results of the SARS-CoV-2 N-gene amplified with different primer sets (“2019-nCoV-setl” through “2019-nCoV-set12”) and detected using LbCas12a and a gRNA directed to the N-gene of SARS-CoV-2 (“R1763,” SEQ ID NO: 323). A lower time to result is indicative of a positive result. For all primer sets, the time to result was lower for samples with more of the target sequence, indicating that the assay was sensitive for the target sequence. FIG. 79 shows the individual traces of the DETECTR reactions plotted in FIG. 78 for the 0 fM and 5 fM samples. In each plot, the 0 fM trace is not visible above the baseline, indicating that there little to no non-specific detection. The best performing primer set for R1763 (SEQ ID NO: 323) was SARS-CoV-2-N-setl. Time to detect was less than 10 minutes at the tested concentration.

[0782] In a second assay, primer sets directed to the E-gene of Sarbeco (detected with gRNAs R1764 and R1765) and the N-gene of Sarbeco (detected with R1767). FIG. 80 shows the time to result of a DETECTR reaction on samples containing either the N-gene, the E-gene, or no target (“NTC”). Samples were amplified using primer sets directed to the E-gene of SARS-CoV-2 (“2019-nCoV-E-set13” through “2019-nCoV-E-set20”) or to the N-gene of SARS-CoV-2 (“2019-nCoV-N-set21” through “2019-nCoV-N-set24”). Target site sequences are provided in TABLE 21. The best performing primer set was SARS-CoV-2-E-set14. The presence of the SARS-CoV-2 N-gene was detected using the R1767 N-gene gRNA (SEQ ID NO: 327) and the presence of the SARS-CoV-2 E-gene was detected using either the R1764 E-gene gRNA (SEQ ID NO: 324) or the R1765 E-gene gRNA (SEQ ID NO: 325).

[0783] A control primer set for amplifying RNase P was also tested. FIG. 83 shows the amplification of RNase P using a POP7 sample primer set. Samples were amplified using LAMP. DETECTR reactions were performed using a gRNA directed to RNase P (“R779,” SEQ ID NO: 330) and a Cas12 variant (SEQ ID NO: 37). Samples contained either HeLa total RNA or HeLa genomic DNA. A series of line graphs is shown in the bottom half of FIG. 83. At the top of the bottom half of FIG. 83 are graphs of DETECTR reactions with HeLa total RNA as the target, which from left to right show decreasing concentrations of the target as follows: 20 ng/μl, 4 ng/μl, 0.8 ng/μl, 0.16 ng/μl, 0.032 ng/μl, 0.0064 ng/μl, 0.00128 ng/μl, and 0 ng/μl. The x-axis shows time in minutes ranging from 0 to 30 in increments of 10. The y-axis shows raw fluorescence in arbitrary units (AU) ranging from 0 to 50000 in increments of 10000. At the bottom of the bottom half of FIG. 83 are graphs of DETECTR reactions with HeLa genomic DNA as the target, which from left to right show decreasing concentrations of the target as follow: 20 ng/μl, 4 ng/μl, 0.8 ng/μl, 0.16 ng/μl, 0.032 ng/μl, 0.0064 ng/μl, 0.00128 ng/μl, and 0 ng/μl. The x-axis shows time in minutes ranging from 0 to 30 in increments of 10. The y-axis shows raw fluorescence in arbitrary units (AU) ranging from 0 to 50000 in increments of 10000.

### Example 33

### Specificity of Detection of a SARS-CoV-2 Target Nucleic Acid

[0784] This example describes the specificity of detection of a SARS-CoV-2 target nucleic acid. A sample containing target RNA corresponding to SARS-CoV-2 was amplified as using primer set 1 as described in EXAMPLE 2. gRNAs were screened for compatibility with different primer sets designed to amplify either the N-gene or the E-gene of SARS-CoV-2. FIG. 98 shows the results of a DETECTR assay evaluating multiple gRNAs for detecting SARS-CoV-2 using LbCas12a. Target nucleic acid sequences were amplified using primer sets to amplify the SARS-CoV-2 E-gene (“2019-nCoV-E-set13” through “2019-nCoV-E-set20” or the SARS-CoV-2 N-gene (“2019-nCoV-N-set21” through “2019-nCoV-N-set24”). The gRNA corresponding to SEQ ID NO: 324 (“R1764-E-Sarbeco-1) and the gRNA corresponding to SEQ ID NO: 325 (“R1765—E-Sarbeco-2”) were able to detect target sequences amplified using LAMP primer sets directed to the E-gene of SARS-CoV-2. The gRNA corresponding to SEQ ID NO: 327 (“R1767—N-Sarbeco”) was ample to detect target sequences amplified using most LAMP primer sets directed to the N-gene of SARS-CoV-2. FIG. 98 shows a series of line graphs showing DETECTR reactions, which from left to right are 2019-nCoV-E-set13, 2019-nCoV-E-set14, 2019-nCoV-E-set15, 2019-nCoV-E-set16, 2019-nCoV-E-set17, 2019-nCoV-E-set18, 2019-nCoV-E-set19, 2019-nCoV-E-set20, 2019-nCoV-E-set21, 2019-nCoV-E-set22, 2019-nCoV-E-set23, and 2019-nCoV-E-set24. In the top row of graphs, the second, third, and fourth graph from the right show that R1767 exhibits the highest signal most quickly. In the middle row of graphs, the first 8 graphs from the left show that R1764 and R1765 exhibit the highest signal most quickly. In the bottom row of graphs, the sixth graph from the left shows that R1764 and R1765 exhibit the highest signal most quickly. The x-axis on all the graphs shows time in minutes ranging from 0 to 75 in increments of 25 and the y-axis on all the graphs shows raw fluorescence in arbitrary units (AU) ranging from 0 to 60000 in increments in 20000.

[0785] Samples containing either 5 fM or 0 fM SARS-CoV-2 RNA were detected using a DETECTR assay. Samples were detected using LbCas12a and either a gRNA R1763 directed to the N-gene of SARS-CoV-2 or a gRNA R1766 directed to the N-gene of SARS-CoV. Sequences of the gRNAs used in this example are provided in TABLE 20. FIG. 81 shows the DETECTR assay results of the SARS-CoV-2 N-gene amplified with primer set 1 (“2019-nCoV-sett”) and detected using LbCas12a (SEQ ID NO: 27) and either a gRNA directed to the N-gene of SARS-CoV-2 (“R1763—CDC-N2-Wuhan,” SEQ ID NO: 323) or a gRNA directed to the N-gene of SARS-CoV (“R1766—CDC-N2-SARS,” SEQ ID NO: 326).

[0786] FIG. 87A schematically illustrates the sequence of the CDC-N2 target site used for detecting the N-2 gene of SARS-CoV-2 in this assay. Target site sequences are provided in TABLE 21.

TABLE 20
Exemplary gRNA Sequences for Detection of Coronaviruses

| SEQ ID NO: | gRNA | Target | Sequence |
|---|---|---|---|
| SEQ ID NO: 323 | R1763 | CDC-N2-Wuhan | UAAUUUCUACUAAGUGUAGAUCC |
| | | | CCCAGCGCUUCAGCGUUC |
| SEQ ID NO: 324 | R1764 | E-Sarbeco-1 | UAAUUUCUACUAAGUGUAGAUUU |
| | | | GCUUUCGUGGUAUUCUUG |
| SEQ ID NO: 325 | R1765 | E-Sarbeco-2 | UAAUUUCUACUAAGUGUAGAUGU |
| | | | GGUAUUCUUGCUAGUUAC |
| SEQ ID NO: 326 | R1766 | CDC-N2-SARS | UAAUUUCUACUAAGUGUAGAUGU |
| | | | CCAAGUGCCUCUGCAUUC |
| SEQ ID NO: 327 | R1767 | N-Sarbeco-1 | UAAUUUCUACUAAGUGUAGAUCC |
| | | | AAUGUUGUUCCUUGAGGA |
| SEQ ID NO: 328 | R1768 | ORF1ab-Wuhan | UAAUUUCUACUAAGUGUAGAUCA |
| | | | CAUACCGCAGACGGUACA |
| SEQ ID NO: 329 | R1769 | CDC-RNaseP | UAAUUUCUACUAAGUGUAGAUGA |
| | | | CCUGCGAGCGGGUUCUGA |
| SEQ ID NO: 330 | R779 | RNaseP POP7 | UAAUUUCUACUAAGUGUAGAUAA |
| | | | UUACUUGGGUGUGACCCU |
| SEQ ID NO: 331 | R1965 | RNaseP POP7 v2 | UAAUUUCUACUAAGUGUAGAUUU |
| | | | ACAUGGCUCUGGUCCGAG |
| SEQ ID NO: 332 | R780 | RNaseP POP7 v3 | UAAUUUCUACUAAGUGUAGAUGG |
| | | | CTTCCAGGGAACAGGCCT |

### Example 34

### Limit of Detection of SARS-CoV-2

[0787] This example describes the limit of detection of SARS-CoV-2. Samples containing decreasing copy numbers of SARS-CoV-2 target nucleic acid were detected using a DETECTR reaction. FIG. 82 shows the results of a DETECTR reaction to determine the limit of detection of SARS-CoV-2 in a DETECTR reaction amplified using a primer set directed to the N-gene of SARS-CoV-2 (“2019-nCoV-N-set1”). Samples containing either 15,000, 4,000, 1,000, 500, 200, 100, 50, 20, or 0 copies of a SARS-CoV-2 N-gene target nucleic acid were detected. A gel of the N-gene RNA is shown below. Samples were detected using a gRNA directed to the N-gene of SARS-CoV-2 (SEQ ID NO: 323).

[0788] FIG. 116 shows DETECTR analysis of SARS-CoV-2 identifies down to 10 viral genomes in approximately 30 min (20 min amplification, 10 min DETECTR). Duplicate LAMP reactions were amplified for twenty min followed by LbCas12a DETECTR analysis.

[0789] FIG. 117 shows the raw fluorescence at 5 minutes for the LbCas12a DETECTR analysis provided in FIG. 116. The limit of detection of the SARS-CoV-2 N-gene was determined to be 10 viral genomes per reaction (n=6).

### Example 35

### Multiplexing SARS-CoV-2 Primer Sets for Detection of SARS-CoV-2

[0790] This example describes multiplexing SARS-CoV-2 primer sets for detection of SARS-CoV-2. Samples containing target nucleic acids were amplified using a combination of primer sets directed to one or more of SARS-CoV-2 or RNase P. Primer sets directed to SARS-CoV-2 are denoted by “set” with a number. FIG. 84 shows the time to result of a multiplexed DETECTR reaction. Samples contained either in vitro transcribed N-gene of SARS-CoV-2 (“N-gene IVT”), in vitro transcribed E-gene of SARS-CoV-2 (“E-gene IVT”), HeLa total RNA, or no target (“NTC”). Samples were amplified using one or more primer sets directed to the SARS-CoV-2 N-gene (“set1”), the SARS-CoV-2 E-gene (“set14”), or RNase” (“RNaseP”). FIG. 85 shows the time to results of a multiplexed DETECTR reaction with different combinations of primer sets directed to either SARS-CoV-2 N-gene (“set1”), SARS-CoV-2 E-gene (“set14”), or RNase P. Samples containing in vitro transcribed N-gene of SARS-CoV-2 (left, “N-gene IVT”) or in vitro transcribed E-gene of SARS-CoV-2 (right, “E-gene IVT”) were tested. FIG. 86 shows the time to result of a multiplexed DETECTR reaction with the best performing primer set combinations from FIG. 84 and FIG. 85. FIG. 84, at bottom, shows a series of line graphs of DETECTR reactions for different primer sets, which from left to right are 0.5× set1, 0.5× set14, 0.5× RNaseP, 0.25× set1, 0.25× set14, 0.25× RNaseP, 0.5× set1/RNaseP, 0.5× set1/set14/RNaseP, 0.5 set14/RNaseP, 0.25× set1/RNaseP, 0.25× set1/set14/RNaseP, 0.25× set14/RNaseP. The x-axis shows time in minutes ranging from 0 to 60 in increments of 10. The y-axis ranges from 0e+00 to 3e+07 in increments of 1e+07. Each line on the graph shows targets including N-gene IVT, E-gene IVT, HeLa total RNA, and non-target control (NTC). In each graph, the NTC line is essentially the lowest line and in some graphs is primarily flat. In the left most graph, the N-gene IVT line exhibits the highest signal most quickly. In the second from the leftmost graph, the E-gene IVT line exhibits the highest signal most quickly. In the third from the leftmost graph, the HeLa total RNA line exhibits the highest signal most quickly with the N-gene IVT and E-gene IVT lines exhibiting signal later on near 40-50 minutes. In the fourth from the leftmost graph, the N-gene IVT line exhibits the highest signal most quickly followed by the HeLa total RNA line exhibiting signal later on near 40-50 minutes. In the fifth from the leftmost graph, the E-gene IVT line exhibits the highest signal most quickly. In the sixth from the leftmost graph, the HeLa total RNA line exhibits the highest signal most quickly. In the seventh from the leftmost graph, the N-gene IVT and HeLa total RNA lines exhibit the highest signals most quickly. In the eight from the leftmost graph, the N-gene IVT, E-gene IVT, and HeLa total RNA lines exhibit the highest signals most quickly. In the ninth from the leftmost graph, the E-gene IVT and HeLa total RNA lines exhibit the highest signals most quickly. In the tenth from the leftmost graph, the N-gene IVT and HeLa total RNA lines exhibit the highest signal most quickly. In the eleventh from the leftmost graph, the N-gene IVT, E-gene IVT, and HeLa total RNA lines exhibit the highest signals most quickly. In the rightmost graph, the E-gene IVT and HeLa total RNA lines exhibit the highest signals most quickly.

[0791] FIG. 101 shows the results of a DETECTR assay evaluating LAMP primer sets for their utility in multiplexed amplification of SARS-CoV-2 targets. Samples were amplified with one or more primer sets directed to the SARS-CoV-2 N-gene (“set1”) or the SARS-CoV-2 E-gene (“set14”), or RNase P (“RNaseP”). Samples were detected with either a gRNA directed to the N-gene of SARS-CoV-2 (SEQ ID NO: 323, “N-gene”), the E-gene of SARS-CoV-2 (SEQ ID NO: 325, “E-gene”), or RNase P (SEQ ID NO: 330).

### Example 36

### Sensitivity of a DETECTR Assay to Distinguish Three Coronaviruses

[0792] This example describes the sensitivity of a DETECTR assay to distinguish three coronaviruses. Samples containing 250 pM of either RNA corresponding to the N-gene of SARS-CoV-2, the N-gene of SARS-CoV, or the N-gene of bat-SL-CoV45. Samples were amplified at detected as described in EXAMPLE 2. Samples were detected using each of a gRNA directed to the N-gene of SARS-CoV-2 (“R1763”), a gRNA directed to the N-gene of SARS-CoV (“R1766”), or a gRNA directed to the N-gene of a Sarbeco coronavirus (“R1767”). Sequences of the gRNAs used in this example are provided in TABLE 20. FIG. 87B schematically illustrates the sequence of a region of the SARS-CoV-2 N-gene (“N-Sarbeco”) target site. Target site sequences are provided in TABLE 21. FIG. 88 shows the results of a DETECTR assay to determine the sensitivity of gRNAs directed to either N-gene of SARS-CoV-2 (“R1763,” SEQ ID NO: 323), the N-gene of SARS-CoV (“R1766,” SEQ ID NO: 326), or the N-gene of a Sarbeco coronavirus (“R1767,” SEQ ID NO: 327) for samples containing either the N-gene of SARS-CoV-2 (“N-2019-nCoV”), the N-gene of SARS-CoV (“N-SARS-CoV”), or the N-gene of bat-SL-CoV45 (“N-bat-SL-CoV45”). SARS-CoV-2, SARS-CoV, and bat-SL-CoV45 are strains of sarbeco coronavirus. Samples were detected using LbCas12a (SEQ ID NO: 27). FIG. 88 shows line graphs of DETECTR reactions. The graphs from left to right show different targets including N-2019-nCoV, N-SARS-CoV, and N-bat-SL-CoV45. The x-axis shows time in minutes ranging from 0 to 75 in increments of 25. The y-axis shows raw fluorescence in arbitrary units (AU) ranging from 0 to 1000000 in increments of 250000. The three lines in each graph include R1763, R1766, and R1767. In the leftmost graph, the R1766 line appears flat while the R1763 and R1767 lines exhibit the highest signal most quickly. In the middle graph, the R1763 line appears flat while the R1766 and R1767 lines exhibit the highest signal most quickly. In the rightmost graph, the R1763 line appears flat while the R1766 and R1767 lines exhibit the highest signal most quickly.

[0793] FIG. 99 shows the results of a DETECTR assay evaluating multiple gRNAs for their utility in distinguishing between three different strains of coronavirus, SARS-CoV-2 (“COVID-2019”), SARS-CoV, or bat-SL-CoV45. Samples containing N-gene amplicons of either SARS-CoV-2 (“N-2019-nCoV”), SARS-CoV (“N-SARS-CoV”), or bat-SL-CoV45 (“N-bat-SL-CoV45”) were tested. Samples were detected with a gRNA directed to the N-gene of SARS-CoV-2 (SEQ ID NO: 323, “COVID-2019 gRNA”), a gRNA directed to the N-gene of SARS-CoV (SEQ ID NO: 326, “SARS-CoV gRNA”), or a gRNA directed to the N-gene of multiple coronavirus species (SEQ ID NO: 327, “multi-CoV gRNA”).

TABLE 21
Exemplary Coronavirus N-Gene and E-Gene Gene Fragments

| SEQ ID NO: | Target | Sequence |
|---|---|---|
| SEQ ID NO: | 2019- | CCAAATTGGCTACTACCGAAGAGCTACCAGACGAATTCGTGGT |
| 333 | nCoV | GGTGACGGTAAAATGAAAGATCTCAGTCCAAGATGGTATTTCTA |
| | N-gene | CTACCTAGGAACTGGGCCAGAAGCTGGACTTCCCTATGGTGCTA |
| | | ACAAAGACGGCATCATATGGGTTGCAACTGAGGGAGCCTTGAA |
| | | TACACCAAAAGATCACATTGGCACCCGCAATCCTGCTAACAAT |
| | | GCTGCAATCGTGCTACAACTTCCTCAAGGAACAACATTGCCAAA |
| | | AGGCTTCTACGCAGAAGGGAGCAGAGGCGGCAGTCAAGCCTCT |
| | | TCTCGTTCCTCATCACGTAGTCGCAACAGTTCAAGAAATTCAAC |
| | | TCCAGGCAGCAGTAGGGGAACTTCTCCTGCTAGAATGGCTGGC |
| | | AATGGCGGTGATGCTGCTCTTGCTTTGCTGCTGCTTGACAGATT |
| | | GAACCAGCTTGAGAGCAAAATGTCTGGTAAAGGCCAACAACAA |
| | | CAAGGCCAAACTGTCACTAAGAAATCTGCTGCTGAGGCTTCTAA |
| | | GAAGCCTCGGCAAAAACGTACTGCCACTAAAGCATACAATGTA |
| | | ACACAAGCTTTCGGCAGACGTGGTCCAGAACAAACCCAAGGAA |
| | | ATTTTGGGGACCAGGAACTAATCAGACAAGGAACTGATTACAA |
| | | ACATTGGCCGCAAATTGCACAATTTGCCCCCAGCGCTTCAGCGT |
| | | TCTTCGGAATGTCGCGCATTGGCATGGAAGTCACACCTTCGGGA |
| | | ACGTGGTTGACCTACACAGGTGCCATCAAATTGGATGACAAAG |
| | | ATCCAAATTTCAAAGATCAAGTCATTTTGCTGAATAAGCATATT |
| | | GACGCATACAAAACATTCCCACCAACAGAGCCTAAAAAGGACA |
| | | AAAAGAAGAAGGCTGATGAAACTCAAGCCTTACCGCAGAGACA |
| | | GAAGAAACAGCAAACTGTG |
| SEQ ID NO: | SARS- | CCAAATTGGCTACTACCGAAGAGCTACCCGACGAGTTCGTGGT |
| 334 | CoVN- | GGTGACGGCAAAATGAAAGAGCTCAGCCCCAGATGGTACTTCT |
| | gene | ATTACCTAGGAACTGGCCCAGAAGCTTCACTTCCCTACGGCGCT |
| | | AACAAAGAAGGCATCGTATGGGTTGCAACTGAGGGAGCCTTGA |
| | | ATACACCCAAAGACCACATTGGCACCCGCAATCCTAATAACAA |
| | | TGCTGCCACCGTGCTACAACTTCCTCAAGGAACAACATTGCCAA |
| | | AAGGCTTCTACGCAGAGGGAAGCAGAGGCGGCAGTCAAGCCTC |
| | | TTCTCGCTCCTCATCACGTAGTCGCGGTAATTCAAGAAATTCAA |
| | | CTCCTGGCAGCAGTAGGGGAAATTCTCCTGCTCGAATGGCTAGC |
| | | GGAGGTGGTGAAACTGCCCTCGCGCTATTGCTGCTAGACAGATT |
| | | GAACCAGCTTGAGAGCAAAGTTTCTGGTAAAGGCCAACAACAA |
| | | CAAGGCCAAACTGTCACTAAGAAATCTGCTGCTGAGGCATCTA |
| | | AAAAGCCTCGCCAAAAACGTACTGCCACAAAACAGTACAACGT |
| | | CACTCAAGCATTTGGGAGACGTGGTCCAGAACAAACCCAAGGA |
| | | AATTTCGGGGACCAAGACCTAATCAGACAAGGAACTGATTACA |
| | | AACATTGGCCGCAAATTGCACAATTTGCTCCAAGTGCCTCTGCA |
| | | TTCTTTGGAATGTCACGCATTGGCATGGAAGTCACACCTTCGGG |
| | | AACATGGCTGACTTATCATGGAGCCATTAAATTGGATGACAAA |
| | | GATCCACAATTCAAAGACAACGTCATACTGCTGAACAAGCACA |
| | | TTGACGCATACAAAACATTCCCACCAACAGAGCCTAAAAAGGA |
| | | CAAAAAGAAAAAGACTGATGAAGCTCAGCCTTTGCCGCAGAGA |
| | | CAAAAGAAGCAGCCCACTGTG |
| SEQ ID NO: | bat-SL- | CCAAATTGGCTACTACCGTAGAGCTACCAGACGAATTCGTGGTG |
| 335 | CoVZC | GTGACGGTAAAATGAAAGAGCTCAGCCCCAGATGGTATTTTTA |
| | 45 N- | CTATCTAGGAACTGGACCAGAAGCTGGACTTCCCTATGGTGCTA |
| | gene | ACAAAGAAGGCATCATATGGGTTGCAACTGAGGGAGCCTTAAA |
| | | CACACCGAAAGACCACATTGGCACCCGCAATCCTGCTAACAAT |
| | | GCTGCAATCGTGCTACAACTTCCTCAAGGAACAACATTGCCAAA |
| | | AGGCTTCTACGCAGAAGGGAGCAGAGGCGGCAGTCAAGCTTCT |
| | | TCACGCTCCTCATCACGTAGTCGCAACAGTTCAAGAAACTCAAC |
| | | TCCAGGCAGCAGTAGGGGAACTTCTCCTGCTAGAATGGCTGGC |
| | | AATGGCGGTGACACTGCTCTTGCTTTGCTGCTGCTAGATAGGTT |
| | | GAACCAGCTTGAGAACAAAGTATCTGGCAAAGGCCAACAACAA |
| | | CAGGGCCAAACTGTCACTAAGAAATCTGCTGCTGAGGCATCTA |
| | | AAAAGCCTCGCCAAAAACGTACTGCTACAAAACAGTACAACGT |
| | | CACTCAAGCATTTGGGAGACGTGGTCCAGAACAAACCCAAGGA |
| | | AATTTTGGGGACCAAGAATTAATCAGACAAGGAACTGATTACA |
| | | AACATTGGCCGCAAATTGCACAATTTGCTCCAAGTGCCTCTGCA |
| | | TTCTTTGGAATGTCACGCATTGGCATGGAAGTCACACCTTCGGG |
| | | AACATGGCTGACTTATCATGGAGCCATTAAATTGGATGACAAA |
| | | GATCCACAATTCAAAGATAACGTCATACTGCTGAATAAGCACA |
| | | TTGACGCATACAAAACATTCCCACCAACAGAGCCTAAAAAGGA |
| | | CAAAAAGAAAAAGGCTGATGAACTTCAGGCTTTACCGCAGAGA |
| | | CAGAAGAAACAACAAACTGTG |
| SEQ ID NO: | 2019- | ACTATTACCAGCTGTACTCAACTCAATTGAGTACAGACACTGGT |
| 336 | nCoV | GTTGAACATGTTACCTTCTTCATCTACAATAAAATTGTTGATGA |
| | E-gene | GCCTGAAGAACATGTCCAAATTCACACAATCGACGGTTCATCCG |
| | | GAGTTGTTAATCCAGTAATGGAACCAATTTATGATGAACCGACG |
| | | ACGACTACTAGCGTGCCTTTGTAAGCACAAGCTGATGAGTACG |
| | | AACTTATGTACTCATTCGTTTCGGAAGAGACAGGTACGTTAATA |
| | | GTTAATAGCGTACTTCTTTTTCTTGCTTTCGTGGTATTCTTGCTA |
| | | GTTACACTAGCCATCCTTACTGCGCTTCGATTGTGTGCGTACTG |
| | | CTGCAATATTGTTAACGTGAGTCTTGTAAAACCTTCTTTTTACGT |
| | | TTACTCTCGTGTTAAAAATCTGAATTCTTCTAGAGTTCCTGATCT |
| | | TCTGGTCTAAACGAACTAAATATTATATTAGTTTTTCTGTTTGGA |
| | | ACTTTAATTTTAGCCATGGCAGATTCCAACGGTACTATTACCGT |
| | | TGAAGAGCTTAAAAAGCTCCTTGAACAATGGAACCTAGTAATA |
| | | GGTTTCCTATTCCTTACATGGATT |
| SEQ ID NO: | SARS- | TTTACTACCAGCTTGAGTCTACACAAATTACTACAGACACTGGT |
| 337 | CoV E- | ATTGAAAATGCTACATTCTTCATCTTTAACAAGCTTGTTAAAGA |
| | gene | CCCACCGAATGTGCAAATACACACAATCGACGGCTCTTCAGGA |
| | | GTTGCTAATCCAGCAATGGATCCAATTTATGATGAGCCGACGAC |
| | | GACTACTAGCGTGCCTTTGTAAGCACAAGAAAGTGAGTACGAA |
| | | CTTATGTACTCATTCGTTTCGGAAGAAACAGGTACGTTAATAGT |
| | | TAATAGCGTACTTCTTTTTCTTGCTTTCGTGGTATTCTTGCTAGT |
| | | CACACTAGCCATCCTTACTGCGCTTCGATTGTGTGCGTACTGCT |
| | | GCAATATTGTTAACGTGAGTTTAGTAAAACCAACGGTTTACGTC |
| | | TACTCGCGTGTTAAAAATCTGAACTCTTCTGAAGGAGTTCCTGA |
| | | TCTTCTGGTCTAAACGAACTAACTATTATTATTATTCTGTTTGGA |
| | | ACTTTAACATTGCTTATCATGGCAGACAACGGTACTATTACCGT |
| | | TGAGGAGCTTAAACAACTCCTGGAACAATGGAACCTAGTAATA |
| | | GGTTTCCTATTCCTAGCCTGGATT |
| SEQ ID NO: | bat-SL- | ATTACTACCAGCTGTACTCAACACAAGTGAGTACAGACACTGGT |
| 338 | CoVZC | GTTGAACATGTTACTTTCTTCATCTACAATAAAATTGTTGATGA |
| | 45 E- | GCCTGAAGAACATGTTCAAATTCACACAATCGACGGTACATCTG |
| | gene | GAGTTGTTAATCCAGCAATGGAACCAATTTATGATGAACCGAC |
| | | GACGACTACTAGCGTGCCTTTGTAAGCACAAGCTGATGAGTAC |
| | | GAACTTATGTACTCATTCGTTTCGGAAGAGACAGGTACGTTAAT |
| | | AGTTAATAGCGTACTTCTTTTTCTTGCTTTTGTGGTATTCTTGCT |
| | | AGTCACACTAGCCATCCTTACTGCGCTTCGATTGTGTGCGTACT |
| | | GCTGCAATATTGTTAACGTGAGTCTTGTAAAACCTTCTTTTTACG |
| | | TTTACTCTCGTGTTAAAAATCTGAATTCTTCTAGAGTTCCTGATC |
| | | TTTTGGTCTAAACGAACTAAATATTATATTAGTCTTTCTGTTTGG |
| | | AACTTTAATTTTAGCCATGTCAGGTGACAACGGTACCATTACCG |
| | | TTGAAGAGCTTAAAAAGCTCTTAGAACAATGGAACCTAGTAAT |
| | | AGGATTCTTGTTTCTTACATGGATT |

### Example 37

### Sensitivity of Detection of the E-Gene of Four Coronaviruses

[0794] This example describes the sensitivity of detection of the E-gene of three coronaviruses. Samples containing 250 pM of either RNA corresponding to the E-gene of SARS-CoV-2, the E-gene of SARS-CoV, the E-gene of bat-SL-CoV45, or the E-gene of bat-SL-CoV21. Samples were amplified at detected as described in EXAMPLE 2. Samples were detected using each of a first gRNA directed to the E-gene (R1764), or a second gRNA directed to the E-gene (R1765). Sequences of the gRNAs used in this example are provided in TABLE 20. FIG. 89 schematically illustrates the sequence of a region of the SARS-CoV-2 E-gene (“E-Sarbeco”) target site. Target site sequences are provided in TABLE 21. FIG. 90 shows the results of a DETECTR assay to determine the sensitivity of two gRNAs directed to a coronavirus N-gene for samples containing either the E-gene of SARS-CoV-2 (“E-2019-nCoV”), the E-gene of SARS-CoV (“E-SARS-CoV”), the E-gene of bat-SL-CoV45 (“E-bat-SL-CoV45”), or the E-gene of bat-SL-CoV21 (“E-bat-SL-CoV21”). Samples were detected with LbCas12a (SEQ ID NO: 27) and either a gRNA corresponding to SEQ ID NO: 324 (“R1764—E gene 1”) or a gRNA corresponding to SEQ ID NO: 325 (“R1765—E gene 2”). Fluorescence intensity was measured over time.

[0795] FIG. 100 shows the results of a DETECTR assay evaluating multiple gRNAs for their utility in distinguishing between three different strains of coronavirus, SARS-CoV-2 (“COVID-2019”), SARS-CoV, or bat-SL-CoV45. Samples containing E-gene amplicons of either SARS-CoV-2 (“N-2019-nCoV”), SARS-CoV (“N-SARS-CoV”), or bat-SL-CoV45 (“N-bat-SL-CoV45”) were tested. Samples were detected using gRNAs directed to the E-gene of multiple coronaviruses corresponding to SEQ ID NO: 324 (“E-gene gRNA #1”) or SEQ ID NO: 325 (“E-gene gRNA #2”). Detection of a sample with a gRNA directed to the E-gene enabled broad spectrum targeting of related coronavirus strains.

### Example 38

### Detection of a Coronavirus Using a Lateral Flow DETECTR Reaction using a Cas12 Variant

[0796] This example describes the detection of a coronavirus using a lateral flow DETECTR reaction. FIG. 106 illustrates the design of detector nucleic acids compatible with a PCRD lateral flow device. Exemplary compatible detector nucleic acids, rep072, rep076, and rep100, are provided (left). These detector nucleic acids may be used in a PCRD lateral flow device (right) to detect the presence or absence of a target nucleic acid. The top right schematic illustrates an exemplary band configuration produced when contacted to a sample that does not contain a target nucleic acid. The bottom right schematic shows an exemplary band configuration produced when contacted to a sample that does contain a target nucleic acid. Exemplary reporters compatible with a PCRD lateral flow device are provided in TABLE 22. The lateral flow cleavage reporter Rep100 enables detection of a sample on a lateral flow strip with application of the signal lines. The Rep072 reporter only gives a signal on the IgG line following cleavage of the reporter by a programmable nuclease. Similar to the rep076 reporter, which is attached to magnetic beads, the rep100 reporter generates a signal at the FAM-Biotin line on the PCRD strip when cleaved. However, unlike rep076, the rep100 reporter is captured at the DIG-biotin line, which eliminates the need for magnetic beads.

[0797] A sample comprising an RNA target sequence from a coronavirus was amplified using isothermal amplification. Samples containing either 0 fM (“−”) or 5 fM (“+”) of in vitro transcribed coronavirus N-gene were amplified for 60 minutes using a reverse-transcription LAMP (RT-LAMP) amplification assay. A DETECTR reaction was performed using a Cas12 variant (SEQ ID NO: 37) for either 0 min, 2.5 min, 5 min, or 10 min. FIG. 91 shows the results of a lateral flow DETECTR reaction to detect the presence or absence of a SARS-CoV-2 N-gene target RNA using a Cas12 variant (SEQ ID NO: 37). Lateral flow test strips are shown. Samples either containing (“+”) or lacking (“−”) in vitro transcribed SARS-CoV-2 N-gene RNA (“N-gene IVT”) were tested. The top set of horizontal lines (denoted “test”) indicated the results of the DETECTR reaction. The DETECTR reaction was sensitive for samples containing the in vitro transcribed coronavirus target sequence.

TABLE 22
Exemplary Reporter Sequences for Detection of Coronaviruses

| Reporter | Sequence |
|---|---|
| Rep072 | /56-FAM/TTATTATT/3Bio/ (SEQ ID NO: 9) |
| Rep076 | /56-FAM/*/iBiodT/*AATTAATTAATTAATTAATT/3ThioMC3-D/ (SEQ ID NO: 372) |
| Rep100 | /56-FAM/*/iBiodT/*AATTAATTAATTAATTAATT/3DiG_N/ (SEQ ID NO: 372) |

### Example 39

### Detection of SARS-CoV-2 Using a Lateral Flow DETECTR Reaction

[0798] This example describes the detection of SARS-CoV-2 using a lateral flow DETECTR reaction. FIG. 92 illustrates schematically the detection of a target nucleic acid using a programmable nuclease. Briefly, a Cas protein with trans collateral cleavage activity is activated upon binding to a guide nucleic acid and a target sequence reverse complementary to a region of the guide nucleic acid. The activated programmable nuclease cleaves a reporter nucleic acid, thereby producing a detectable signal. FIG. 93 illustrates schematically detection of the presence or absence of a target nucleic acid in a sample. Select nucleic acids in a sample are amplified using isothermal amplification. The amplified sample is contacted to a programmable nuclease, a guide nucleic acid, and a reporter nucleic acid, as illustrated in FIG. 92. If the sample contains the target nucleic acid, a detectable signal is produced. The presence or absence of a target nucleic acid corresponding to SARS-CoV-2 was detected using a DETECTR reaction following in vitro transcription and isothermal pre-amplification of the target nucleic acid. Samples were detected using a Cas12 programmable nuclease. Samples contained either SARS-CoV-2 viral RNA or a sequence corresponding to RNase P (negative control). Samples were detected using a gRNA directed to SARS-CoV-2 using the DETECTR reaction described in FIG. 92 and FIG. 93. FIG. 94 shows the results of a DETECTR lateral flow reaction to detect the presence or absence of SARS-CoV-2 (“2019-nCoV”) RNA in a sample. Detection of RNase P is used as a sample quality control. Samples were in vitro transcribed and amplified (left) and detected using a Cas12 programmable nuclease (right). Samples containing (“+”) or lacking (“−”) in vitro transcribed SARS-CoV-2 RNA (“2019-nCoV IVT”) were assayed with a Cas12 programmable nuclease and gRNA directed to SARS-CoV-2 for either 0 min or 5 min. The reaction was sensitive for samples containing SARS-CoV-2.

### Example 40

### Testing Clinical Samples for SARS-CoV-2 Using a DETECTR Reaction

[0799] This example describes the testing of clinical samples for SARS-CoV-2 using a DETECTR reaction. Clinical samples were amplified using RT-PCR and detected using LbCas12a. Samples were detected using gRNA (“crRNA”) directed to either the N-gene or the E-gene of SARS-CoV-2 or RNase P (negative control). FIG. 95 shows the results of a DETECTR reaction using an LbCas12a programmable nuclease (SEQ ID NO: 27) to determine the presence or absence of SARS-CoV-2 in patient samples. At the right of FIG. 95 are a set of bar graphs. The bar graph on top shows RT-PCR amplicon testing—15 minutes with the crRNA being varied on the x-axis and from left to right show crRNA for the N gene, E gene and RNase P. The y-axis shows raw fluorescence in arbitrary units (AU) ranging from 0 to 60000 in increments of 20000. Within each crRNA group are the different targets tested, which from left to right are sample 1, sample 1 NTC, sample 2, sample 2 NTC, and DETECTR NTC. The bar graph on bottom shows RT-PCR amplicon testing—15 minutes with the target being varied on the x-axis and from left to right show targets of sample 1, sample 1 NTC, sample 2, sample 2 NTC, and DETECTR NTC. The y-axis shows raw fluorescence in arbitrary units (AU) ranging from 0 to 60000 in increments of 20000. Within each target group are different crRNAs tested, which from left to right are N gene, E gene, and RNase P.

[0800] Clinical samples of patients either positive or negative for SARS-CoV-2 were assayed using a lateral flow DETECTR reaction. Samples were amplified and reverse transcribed using RT-PCR and detected using a Cas12 programmable nuclease. A negative control sample (“NTC”) was also assayed. The DETECTR reaction was performed for 5 min. FIG. 96 shows the results of a lateral flow DETECTR reaction to detect the presence or absence of SARS-CoV-2 in patient samples. Samples were detected with either a gRNA directed to SARS-CoV-2 or a gRNA directed to RNase P. Primers directed to a region of the E-gene were used to amplify the target region using RT-PCR.

### Example 41

### Buffer Screening for Improved RT-LAMP Amplification and Detection

[0801] This example describes buffer screening for improved RT-LAMP amplification and detection. Samples containing either HeLa total RNA (“total RNA”), SARS-CoV-2 N-gene RNA and HeLa total RNA (“N-gene +total RNA”) or no target (“NTC”) were amplified using RT-LAMP under different buffer conditions.

[0802] FIG. 102 shows the results of a DETECTR assay evaluating the sensitivity of an RT-LAMP amplification reaction to common sample buffers. Reactions were measured in universal transport medium (UTM, top) or DNA/RNA Shield buffer (bottom) at different buffer dilutions (from left to right: 1×, 0.5×, 0.25×, 0.125×, or no buffer).

### Example 42

### Limit of Detection of SARS-CoV-2 in a DETECTR Assay

[0803] This example describes the limit of detection of SARS-CoV-2 in a DETECTR assay. DETECTR reactions were performed with different copy numbers of SARS-CoV-2 viral genomes. FIG. 103 shows the results of a DETECTR assay to determine the limit of detection (LoD) of the DETECTR assay for SARS-CoV-2 (the virus attributed to the COVID-19 infection). Samples were detected using either a gRNA directed to the N-gene of SARS-CoV-2 (SEQ ID NO: 323, “R1763—N-gene”) or a gRNA directed to RNase P (SEQ ID NO: 330, “R779—RNase P”). Each condition was repeated 7 times. The DETECTR assay was capable of reproducibly and specifically detecting the presence of SARS-CoV-2 RNA down to between about 625 and about 150 copies per reaction.

### Example 43

### Target Specificity of a Multiplexed RT-LAMP Amplification with DETECTR

[0804] This example describes the target specificity of a multiplexed RT-LAMP amplification with DETECTR reaction. FIG. 104 shows the results of a DETECTR assay evaluating the target specificity of a gRNA directed to the N-gene of SARS-CoV-2 (“R1763—N-gene”) in a 2-plex multiplexed RT-LAMP reaction using an LbCas12a programmable nuclease (SEQ ID NO: 27). In vitro transcribed coronavirus N-gene sequences from either SARS-CoV-2 (“2019-nCoV N-gene IVT), SARS-CoV (“SARS-CoV N-gene IVT”), or bat-SL-CoV45 (“bat-SL-CoV45 N-gene IVT”) or clinical remnant samples from patients having different strains of coronavirus (CoV-HKU1, CoV-299E, CoV-OC43, or CoV-NL63) were amplified using a 2-plex multiplexed RT-LAMP amplification. HeLa total RNA was used as a positive control for RNase P. A no target control (“NTC”) was tested as a negative control. The 2-plex multiplexed RT-LAMP amplification amplified the samples using two primer sets, one directed to the SARS-CoV-2 N-gene and one directed to RNaseP. Amplified samples were detected using either a gRNA directed to RNase P (SEQ ID NO: 330, “R779—RNase P”) or the N-gene of SARS-CoV-2 (SEQ ID NO: 323, “R1763—N-gene”). Both gRNAs were capable of detecting samples amplified in a 2-plex multiplexed RT-LAMP amplification assay.

[0805] FIG. 105 shows the results of a DETECTR assay evaluating the target specificity of a gRNA directed to the N-gene of SARS-CoV-2 (“R1763—N-gene”) or the E-gene of SARS-CoV-2 (“R1765—E-gene”) in a 3-plex multiplexed RT-LAMP reaction using an LbCas12a programmable nuclease (SEQ ID NO: 27). In vitro transcribed coronavirus N-gene sequences from either SARS-CoV-2 (“2019-nCoV N-gene IVT), SARS-CoV (“SARS-CoV N-gene IVT”), or bat-SL-CoV45 (“bat-SL-CoV45 N-gene IVT”), in vitro transcribed coronavirus E-gene sequences from SARS-CoV-2 (“2019-nCoV E-gene IVT) or SARS-CoV (“SARS-CoV E-gene IVT”), or clinical remnant samples from patients having different strains of coronavirus (CoV-HKU1, CoV-299E, CoV-OC43, or CoV-NL63) were amplified using a 3-plex multiplexed RT-LAMP amplification. HeLa total RNA was used as a positive control for RNase P. A no target control (“NTC”) was tested as a negative control. The 3-plex multiplexed RT-LAMP amplification amplified the samples using three primer sets, one directed to the SARS-CoV-2 N-gene, one directed to the SARS-CoV-2 E-gene, and one directed to RNaseP. Amplified samples were detected using either a gRNA directed to RNase P (SEQ ID NO: 330, “R779—RNase P”), the N-gene of SARS-CoV-2 (SEQ ID NO: 323, “R1763—N-gene”), or the E-gene of SARS-CoV-2 (SEQ ID NO: 325, “R1765—E-gene”). All three gRNAs were capable of detecting samples amplified in a 3-plex multiplexed RT-LAMP amplification assay.

### Example 44

### Coronavirus Strain Specificity of N-Gene and E-Gene gRNAs

[0806] This example describes coronavirus strain specificity of N-gene and E-gene gRNAs. Guide RNAs were designed to specifically detect the N-gene of SARS-CoV-2. Guide RNAs were also designed to detect the E-gene in three SARS-like coronavirus strains (SARS-CoV, bat SARS-like coronavirus (bat-SL-CoVZC45), and SARS-CoV-2). Synthetic in vitro transcribed (IVT) SARS-CoV-2 RNA gene targets were spiked into nuclease-free water. Samples were detected with a CRISPR-Cas12 based detection assay using LbCas12a (SEQ ID NO: 27). DETECTR assays included an RT-LAMP reaction at 62° C. for 20 min and Cas12 detection reaction at 37° C. for 10 min. Primers for target generation, qPCR, and LAMP amplification are provided in TABLE 23. FIG. 107A illustrates a genome map indicating the locations of the E (envelope) gene and the N (nucleoprotein) gene regions within a coronavirus genome. Corresponding regions or annealing regions of primers and probes relative to the E and N gene regions are shown below the respective gene regions. RT-LAMP primers are indicated by black rectangles, the binding position of the F1c and B1c half of the FIP primer (grey) is represented by a striped rectangle with dashed borders. Regions amplified in tests utilized by the World Health Organization (WHO) and the Center for Disease Control (CDC) are denoted as “WHO E amplicon” and “CDC N2 amplicon,” respectively.

[0807] Guide RNAs were able to distinguish SARS-CoV-2 without cross-reactivity with related coronavirus strains using the N gene gRNA and with the expected cross-reactivity for the E gene gRNA. FIG. 107B shows the results of a DETECTR assay evaluating the specificity or broad detection utility of gRNAs directed to the N-gene or E-gene of various coronavirus strains (SARS-CoV-2, SARS-CoV, or bat-SL-CoVZC45) using an LbCas12a programmable nuclease (SEQ ID NO: 27). The N gene gRNA used in the assay (left, “N-gene”) was specific for SARS-CoV-2, whereas the E gene gRNA was able to detect 3 SARS-like coronavirus (right, “E-gene”). A separate N gene gRNA targeting SARS-CoV and a bat coronavirus failed to detect SARS-CoV-2 (middle, “N-gene related species variant”). Guide RNAs were designed to specifically target SARS-CoV-2 or broadly detect related coronavirus strains. Samples containing either SARS-CoV-2 N-gene (“N-gene: SARS-CoV-2”), SARS-CoV N-gene (“N-gene: SARS-CoV”), bat-SL-CoVZC45 N-gene (“N-gene: bat-SL-CoVZC45”), SARS-CoV-2 E-gene (“E-gene: SARS-CoV-2”), SARS-CoV E-gene (“E-gene: SARS-CoV”), or bat-SL-CoVZC45 E-gene (“E-gene: bat-SL-CoVZC45”) were detected using either a gRNA designed to specifically detect the SARS-CoV N-gene (SEQ ID NO: 323, “N-gene”), a gRNA designed to detect the N-gene of coronavirus variants (SEQ ID NO: 326, “N-gene (related species variant)”), or a gRNA designed to broadly detect coronavirus E-gene (SEQ ID NO: 324, “E-gene”).

TABLE 23
Target Generation and Amplification Primers

| SEQ ID NO: | Name | Sequence | Purpose |
|---|---|---|---|
| SEQ ID NO: 340 | N-gene-FWD IVT | AATTCTAATACGACTCACTATAGGGCC | Target |
| | | AAATTGGCTACTACCGAAGAGCTAC | Generation |
| SEQ ID NO: 341 | N-gene-REV IVT | CACAGTTTGCTGTTTCTTCTGTCTCTGC | Target |
| | | GG | Generation |
| SEQ ID NO: 342 | E-gene-FWD IVT | AATTCTAATACGACTCACTATAGGGCT | Target |
| | | GGTGTTGAACATGTTACCTTCTTCATC | Generation |
| SEQ ID NO: 343 | E-gene-REV IVT | CCTATTACTAGGTTCCATTGTTC | Target |
| | | | Generation |
| SEQ ID NO: 344 | E_Sarbeco_F1 | ACAGGTACGTTAATAGTTAATAGCGT | qPCR |
| SEQ ID NO: 345 | E_Sarbeco_R2 | ATATTGCAGCAGTACGCACACA | qPCR |
| SEQ ID NO: 346 | CDC N2-FWD | TTACAAACATTGGCCGCAAA | qPCR |
| SEQ ID NO: 347 | CDC N2-REV | GCGCGACATTCCGAAGAA | qPCR |
| SEQ ID NO: 348 | F3 2019-nCoVN- | AACACAAGCTTTCGGCAG | LAMP |
| | gene | | |
| SEQ ID NO: 349 | B3 2019-nCoVN- | GAAATTTGGATCTTTGTCATCC | LAMP |
| | gene | | |
| SEQ ID NO: 350 | BIP 2019-nCoV | TGCGGCCAATGTTTGTAATCAGCCAAG | LAMP |
| | N-gene | GAAATTTTGGGGAC | |
| SEQ ID NO: 351 | FIP 2019-nCoV | CGCATTGGCATGGAAGTCACTTTGATG | LAMP |
| | N-gene | GCACCTGTGTAG | |
| SEQ ID NO: 352 | LF 2019-nCoVN- | TTCCTTGTCTGATTAGTTC | LAMP |
| | gene | | |
| SEQ ID NO: 353 | LB 2019-nCoVN- | ACCTTCGGGAACGTGGTT | LAMP |
| | gene | | |
| SEQ ID NO: 354 | F3 2019-nCoV E- | CCGACGACGACTACTAGC | LAMP |
| | gene | | |
| SEQ ID NO: 355 | B3 2019-nCoV E- | AGAGTAAACGTAAAAAGAAGGTT | LAMP |
| | gene | | |
| SEQ ID NO: 356 | BIP 2019-nCoV | ACCTGTCTCTTCCGAAACGAATTTGTA | LAMP |
| | E-gene | AGCACAAGCTGATG | |
| SEQ ID NO: 357 | FIP 2019-nCoV E- | CTAGCCATCCTTACTGCGCTACTCACG | LAMP |
| | gene | TTAACAATATTGCA | |
| SEQ ID NO: 358 | LF 2019-nCoV E- | TCGATTGTGTGCGTACTGC | LAMP |
| | gene | | |
| SEQ ID NO: 359 | LB 2019-nCoV E- | TGAGTACATAAGTTCGTAC | LAMP |
| | gene | | |
| SEQ ID NO: 360 | F3 RNase P POP7 | TTGATGAGCTGGAGCCA | LAMP |
| SEQ ID NO: 361 | B3 RNase P POP7 | CACCCTCAATGCAGAGTC | LAMP |
| SEQ ID NO: 362 | FIP RNase P | GTGTGACCCTGAAGACTCGGTTTTAGC | LAMP |
| | POP7 | CACTGACTCGGATC | |
| SEQ ID NO: 363 | BIP RNase P | CCTCCGTGATATGGCTCTTCGTTTTTTT | LAMP |
| | POP7 | CTTACATGGCTCTGGTC | |
| SEQ ID NO: 364 | LF RNase P POP7 | ATGTGGATGGCTGAGTTGTT | LAMP |
| SEQ ID NO: 365 | LB RNase P POP7 | CATGCTGAGTACTGGACCTC | LAMP |
| SEQ ID NO: 366 | F3 RNase P POP7 | CACATCCGAGTCTTCAGG | LAMP |
| | v2 | | |
| SEQ ID NO: 367 | B3 RNase P POP7 | GGCAATAGTTACAGACCGC | LAMP |
| | v2 | | |
| SEQ ID NO: 368 | FIP RNase P | TCCAGTACTCAGCATGCGAAGCACCCA | LAMP |
| | POP7 v2 | AGTAATTGAAAAGACAC | |
| SEQ ID NO: 369 | BIP RNase P | CTGGAAGCCCAAAGGACTCTATACACA | LAMP |
| | P0P7 v2 | CACTCAGGAAGG | |
| SEQ ID NO: 370 | LF RNase P POP7 | CGGAGGGGATAAGTGGAGGA | LAMP |
| | v2 | | |
| SEQ ID NO: 371 | LB RNase P POP7 | GCATTGAGGGTGGGGGT | LAMP |
| | v2 | | |

### Example 45

### Specific and Broad Detection of Coronaviruses using a Lateral Flow DETECTR Assay

[0808] This example describes specific and broad detection of coronaviruses using a lateral flow DETECTR assay. Lateral flow DETECTR assays can be performed with minimal equipment within appropriate biosafety laboratory requirements. FIG. 107C shows exemplary laboratory equipment utilized in the coronavirus lateral flow DETECTR assays. In addition to appropriate biosafety protective equipment, the equipment utilized includes a sample collection device, microcentrifuge tubes, heat blocks set to 37° C. and 62° C., pipettes and tips, and lateral flow strips.

[0809] The DETECTR assay can be run within 30 to 40 minutes and visualized on a lateral flow strip. Conventional RNA extraction or sample matrix can be used as an input to DETECTR (LAMP pre-amplification and Cas12-based detection for N gene, E gene and RNase P), which is visualized by a fluorescent reader or lateral flow strip. The SARS-CoV-2 DETECTR assay was considered positive if there was detection of both the E and N genes, or presumptive positive if there was detection of either the E or N gene. This interpretation is consistent with that of current FDA Emergency Use Authorization (EUA) guidance and recently approved point-of-care diagnostics under the EUA. FIG. 107D illustrates an exemplary workflow of a DETECTR assay for the detection of a coronavirus in a subject. Patient samples are collected using a nasopharyngeal swab. Conventional RNA extraction or sample matrix can be used as an input to DETECTR (LAMP pre-amplification and Cas12-based detection for NE gene, EN gene and RNase P), which is visualized by a fluorescent reader or lateral flow strip. Samples can be detected directly from the raw sample matrix, or the viral RNA can be extracted and then detected. Viral RNA encoding SARS-CoV-2 E-gene and SARS-CoV N-gene and RNA encoding human RNase P is amplified using an isothermal amplification method such as RT-LAMP. Amplified samples are detected using a Cas12 programmable nuclease complexed with gRNAs directed to SARS-CoV-2 N-gene and E-gene sequences. The Cas12 programmable nuclease cleaves a ssDNA reporter nucleic acid upon complex formation with the target nucleic acid. The sample is then detected using a lateral flow readout. Sample collection may be performed in about 0 min to about 10 min, amplification and detection may be performed in about 20 min to about 30 min, and sample readout may be performed in about 2 min.

[0810] FIG. 107E shows lateral flow test strips (left) indicating a positive test result for SARS-CoV-2 N-gene (left, top) and a negative test result for SARS-CoV-2 N-gene (left, bottom). A positive identification SARS-CoV-2 in a sample required detection of both the E-gene and the N-gene to confirm a positive test. The lateral assay was performed as illustrated and described in FIG. 107D. The table (right) illustrates possible test indicators and associated results for a lateral flow strip-based coronavirus diagnostic assay that tests for the presences of absence of the RNaseP (positive control), SARS-CoV-2 N-gene, and coronavirus E-gene. Detection of the two SARS-CoV-2 viral gene targets and the internal spiked human RNase P control indicates a positive result.

### Example 46

### Amplification and Detection of Patient Samples Directly from Raw Sample Matrix

[0811] This example describes amplification and detection of patient samples directly from raw sample matrix. The capability of the RT-LAMP assay to amplify SARS-CoV-2 nucleic acid directly from raw sample matrix was assessed. Samples consisting of nasal swabs from asymptomatic donors placed in universal transport medium (UTM) or phosphate buffered saline (PBS) and spiked with SARS-CoV-2 IVT target RNA were assayed using RT-LAMP DETECTR reactions. Since nasal swabs are more frequently collected in universal transport medium (UTM) than in phosphate buffered saline (PBS), the effect of running the assay from nasal swab sample matrix consisting of UTM buffer was evaluated. Nasal swabs from asymptomatic donors were collected in UTM or PBS.

[0812] FIG. 110A shows the time to result of an RT-LAMP amplification under different buffer conditions. Time to results was calculated as the time at which the fluorescent value is one third of the max for the experiment. Reactions that failed to amplify are reported with a value of 20 minutes and labeled as “no amp.” Time to result was determined for different starting concentrations of target control plasmid in either water, 10% phosphate buffered saline (PBS), or 10% universal transport medium (UTM). A lower time to result indicates faster amplification. Results indicate that 10% PBS inhibits the assay less than 10% UTM. FIG. 110B shows the results of an RT-LAMP assay to determine the amplification efficiency of the N-gene of SARS-CoV-2, the E-gene of SARS-CoV-2, and RNase P in either 5% UTM, 5% PBS, or water. Samples containing 0.5 fM N-gene in vitro transcribed, 0.5 fM of E-gene in vitro transcribed, and 0.8 ng/μL HeLa total RNA (“N+E+total RNA”) or no target controls (“NTC”) were tested. Evaluation of amplification efficiency for RT-LAMP for the N-gene, E-gene, and RNase P in 5% sample buffer final volume showed that RT-LAMP was functional for all target genes at a 5% sample buffer concentration. Final target concentrations were at 0.5 fM N-gene IVT, 0.5 fM E-gene IVT, and 0.08 ng/μL HeLa total RNA. FIG. 110C shows amplification of RNA directly from nasal swabs in PBS. Time to result was measured as a function of PBS concentration. Nasal swabs (“nasal swab”) were either spiked with HeLa total RNA (left, “total RNA: 0.08 ng/uL”) or water (right, “total RNA: 0 ng/uL”). Samples without a nasal swab (“no swab”) were compared as controls. With RT-LAMP, assay performance degraded at reaction concentrations of ≥10% UTM by volume or ≥20% PBS by volume. The estimated limit of detection decreased to 500 copies/μL in ≥10% UTM and to 1,00 copies/μL in ≥20% PBS. RT-LAMP was capable of amplifying RNA directly from nasal swabs in PBS with the best performance at 5% or 10% final volume of PBS per RT-LAMP pre-amplification reaction. Nasal swabs were prepared in PBS and either spiked with HeLa total RNA or water and run at various concentrations in an RT-LAMP reaction for RNase P.

### Example 47

### Limit of Detection of a DETECTR Assay for SARS-CoV-2

[0813] This example describes the limit of detection of a DETECTR assay for SARS-CoV-2. Using IVT SARS-CoV-2 target RNA spiked into donor nasal swab sample matrix in PBS, the analytic limits of detection (LoD) of the DETECTR assay was compared relative to the US FDA Emergency Use Authorization (EUA)-approved CDC assay (running tests for 2 of the 3 targets, N2 and N3) for detection of SARS-CoV-2. Five 10-fold serial dilutions of in vitro transcribed viral RNA were spiked into sample matrix at concentrations ranging from 101-105 copies/mL, with 6 replicates at each dilution for the DETECTR assay, and 3 replicates at each dilution for the CDC assay. FIG. 111A shows raw fluorescence curves generated by LbCas12a (SEQ ID NO: 27) detection of SARS-CoV-2 N-gene (n=6). The curves showed saturation in less than 20 minutes. FIG. 111B shows the limit of detection of a DETECTR assay for the SARS-CoV-2 N-gene detected with LbCas12a, as determined from the raw fluorescence traces shown in FIG. 111A. Fluorescence intensity was measured with decreasing concentration (copies per mL) of SARS-CoV-2 N-gene. FIG. 111C shows the time to result of the limit of detection DETECTR assay, as determined from the raw fluorescence traces shown in FIG. 111A. A lower time to result indicated faster amplification and detection. The estimated LoD for SARS-CoV-2 DETECTR was approximately 10 copies/μl, which is comparable to the LoD for the CDC N2 and N3 assays. DETECTR analysis of SARS-CoV-2 identified down to 10 viral genomes in less than 30 minutes. Duplicate LAMP reactions were amplified for twenty minutes followed by LbCas12a DETECTR analysis. Further analysis reveals the limit of detection of the SARS-CoV-2 N-gene to be 10 viral genomes per reaction (n=6, FIG. 111B). Evaluation of the time to result of these reactions highlights detection of 10 viral genomes of SARS-CoV-2 in under 5 minutes (n=6, FIG. 111C).

[0814] The analytic limit of detection of the RT-LAMP DETECTR reaction was compared relative to the qRT-PCR detection assay used by the US FDA Emergency Use Authorization-approved CDC assay for detection of SARS-CoV-2. A standard curve for quantitation was constructed using 7 dilutions of a control IVT viral nucleoprotein RNA (“CDC VTC nCoV Transcript”), with 3 replicates at each dilution, and detected using the CDC protocol (FIG. 108D, left). Ten two-fold serial dilutions of the same control nucleoprotein RNA were then used to run the DETECTR assay, with 6 replicates at each dilution (FIG. 108D, middle). The estimated limit of dilution for the CDC assay tested by California Department of Public Health was 1 copy/μL reaction, consistent with the analytic performance in the FDA package insert, versus 10 copies/μL reaction for the DETECTR assay. FIG. 108D shows the results of a DETECTR assay with LbCas12a (middle) or a CDC protocol (left) to determine the limit of detection of SARS-CoV-2. Signal is shown as a function of the number of copies of viral genome per reaction. Representative lateral flow results for the assay shown for 0 copies/μL and 10 copies/μL (right).

[0815] The limit of detection (LoD) was measured for detection of SARS-CoV-2 using a lateral flow device. FIG. 108A illustrates cleavage of a detector nucleic acid labeled with FAM and biotin by a Cas12 programmable nuclease in the presence of a target nucleic acid (top). Schematics of lateral flow test strips (bottom) illustrate markings indicative of either the presence (“positive”) or absence (“negative) of the target nucleic acid in the tested sample. The intact FAM-biotinylated reporter molecule flows to the control capture line. Upon recognition of the matching target, the Cas-gRNA complex cleaves the reporter molecule, which flows to the target capture line.

### Example 48

### Effects Incubation Time in a DETECTR Assay for SARS-CoV-2

[0816] This example describes the effects of incubation time in a DETECTR assay for SARS-CoV-2. Samples were amplified using RT-LAMP and detected using LbCas12a (SEQ ID NO: 27). The effect of the Cas12 reaction incubation time on signal was tested.

[0817] FIG. 108B shows the results of a DETECTR assay using LbCas12a to determine the effect of reaction time for a sample containing either 0 fM SARS-CoV-2 RNA or 5 fM SARS-CoV-2 RNA. Fluorescence signal of LbCas12a detection assay on RT-LAMP amplicon for SARS-CoV-2 N-gene saturated within 10 minutes. RT-LAMP amplicon was generated from 2 μL of 5 fM or 0 fM SARS-CoV-2 N-gene IVT RNA by amplifying at 62° C. for 20 minutes. Visualization of the Cas12 detection reaction was achieved using a FAM-biotin reporter molecule and lateral flow strips designed to capture labeled nucleic acids, as shown in FIG. 108A. Uncleaved reporter molecules are captured at the first detection line (control line), whereas indiscriminate Cas12 cleavage activity generates a signal at the second detection line (test line). To compare the signal generated by Cas12 when using fluorescence or lateral flow, RT-LAMP was performed using 5 fM or 0 fM IVT template using N gene primers and monitored the performance of the Cas12 readout on identical amplicons using a fluorescent plate reader and by lateral flow at 0, 2.5, 5, and 10 minutes. The Cas12 fluorescent signal was detectable in <1 minute, and a visual signal by lateral flow was achieved within 5 minutes. FIG. 112A shows the results of a DETECTR assay using LbCas12a to determine the effect of reaction time for a sample containing either 0 fM SARS-CoV-2 RNA or 5 fM SARS-CoV-2 RNA. Fluorescence signal of LbCas12a (SEQ ID NO: 27) detection assay on RT-LAMP amplicon for SARS-CoV-2 N-gene saturated within 10 minutes. RT-LAMP amplicon was generated from 2 μL of 5 fM or 0 fM SARS-CoV-2 N-gene IVT RNA by amplifying at 62° C. for 20 minutes.

[0818] FIG. 108C shows lateral flow test strips assaying samples corresponding to the samples assayed by DETECTR in FIG. 108B. Bands corresponding to control (C) or test (T) are shown for samples containing either 0 fM SARS-CoV-2 RNA (“−”) or 5 fM SARS-CoV-2 RNA (“+”) as a function of reaction time. LbCas12a on the same RT-LAMP amplicon produced visible signal through lateral flow assay within 5 minutes. FIG. 112B shows lateral flow test strips assaying samples corresponding to the samples assayed by DETECTR in FIG. 112A. Bands corresponding to control (C) or test (T) are shown for samples containing either 0 fM SARS-CoV-2 RNA (“−”) or 5 fM SARS-CoV-2 RNA (“+”) as a function of reaction time. LbCas12a (SEQ ID NO: 27) on the same RT-LAMP amplicon as shown in FIG. 112A produced visible signal through lateral flow assay within 5 minutes.

### Example 49

### Detection of SARS-CoV-2 in Patient Samples using a DETECTR Assay

[0819] This example describes detection of SARS-CoV-2 in patient samples using a DETECTR assay. Extracted RNA from nasal swab samples collected from six patients with documented SARS-CoV-2 infection, nasal swab samples from 15 patients with other influenza or coronavirus infections, and nasal swab samples from five healthy donors were tested. RNA extracts from patients with influenza (n=4) and other human coronavirus infections (common human seasonal coronavirus infections (OC34, HKU1, 229E and NL63, n=7)) were compared to in vitro transcribed SARS-CoV-2 target RNA spiked into nasal swab matrix in UTM and RNA extracted from nasal swabs from 2 SARS-CoV-2 infected patients. Samples were detected using SARS-CoV-2 DETECTR assay with fluorescence and lateral flow strip readouts FIG. 109 shows a table comparing the SARS-CoV-2 DETECTR assay with RT-LAMP of the present disclosure to the SARS-CoV-2 assay with a quantitative reverse transcription polymerase chain reaction (qRT-PCR) detection method. The N-gene target in the DETECTR RT-LAMP assay overlaps the N-gene N2 amplicon detected in the qRT-PCR assay. FIG. 108E shows patient sample DETECTR data. Clinical samples from 6 patients with COVID-19 infection (n=11, 5 replicates) and 12 patients infected with influenza or one of the 4 seasonal coronaviruses (HCoV-229E, HCoV-HKU1, HCoV-NL63, HCoV-OC43) (n=12) were analyzed using SARS-CoV-2 DETECTR (shaded boxes). Signal intensities from lateral flow strips were quantified using ImageJ and normalized to the highest value within the N gene, E gene or RNase P set, with a positive threshold at five standard deviations above background. Final determination of the SARS-CoV-2 test was based on the interpretation matrix in FIG. 107E. FluA denotes Influenza A, and FluB denotes Influenza B. HCoV denotes human coronavirus. FIG. 108F shows lateral flow test strips testing for SARS-CoV-2 in a patient with COVID-19 (positive for SARS-CoV-2, “patient 11”), a no target control sample lacking the target nucleic acid (“NTC”), and a positive control sample containing the target nucleic acid (“PC”). The E-gene was detected using a gRNA corresponding to SEQ ID NO: 325. The N-gene was detected using a gRNA corresponding to SEQ ID NO: 323. All three samples were tested for the presence of the SARS-CoV-2 N-gene, the SARS-CoV-2 E-gene, and RNase P. There was 100% concordance of the results of the Cas12 based assays with the CDC N1/N2 qRT-PCR assays, demonstrating the feasibility of using the DETECTR Cas12 based assays for diagnosing patients with SARS-CoV-2 infection.

[0820] SARS-CoV-2 was detected in 9 of the 11 patient swabs and did not cross react with the other respiratory viruses. The two negative swabs from COVID-19 patients were confirmed to be below the established limit of detection. FIG. 118 shows lateral flow DETECTR results on 10 COVID-19 infected patient samples and 12 patient samples for other viral respiratory infections. Ten samples from 6 patients (COVID19-1 to COVID19-5) with one nasopharyngeal swab (A) and one oropharyngeal swab (B) were tested for SARS-CoV-2 using two different genes, N2 and E as well as a sample input control, RNase P. Results were analyzed in accordance with the guidance provided in FIG. 119. FIG. 119 shows instructions for the interpretation of SARS-CoV-2 DETECTR lateral flow results. FIG. 120A-C show fluorescent DETECTR kinetic curves performed on 11 COVID-19 infected patient samples and 12 patient samples for other viral respiratory infections. Ten nasopharyngeal/oropharyngeal swab samples from 6 patients (COVID19-1 to COVID19-6) were tested for SARS-CoV-2 using two different genes, N2 and E as well as a sample input control, RNase P.

[0821] FIG. 120A shows samples tested using the standard amplification and detection conditions, 10 of the 12 COVID-19 positive patient samples resulted in robust fluorescence curves indicating presence of the SARS-CoV-2 E gene (20-minute amplification, signal within 10 min). No E gene signal was detected in the 12 other viral respiratory clinical samples.

[0822] FIG. 120B shows samples tested for the presence of the SARS-CoV-2 N gene using an extended amplification time to produce strong fluorescence curves (30-minute amplification, signal within 10 min) for 10 of the 12 COVID-19 positive patient samples. No N gene signal was detected in the 12 other viral respiratory clinical samples.

[0823] FIG. 120C shows graphs corresponding to the sample input control, RNase P.

[0824] Given the 100% concordance between lateral flow and fluorescence-based readouts shown in FIG. 120 and FIG. 121, a fluorescence-based readout was used to blindly test an additional 60 nasopharyngeal swab samples from patients with acute respiratory infection for SARS-CoV2 using our DETECTR assay. Of the 60 samples, 30 were positive for COVID-19 infection by qRT-PCR testing and 30 were negative for COVID-19 infection but either positive for another viral respiratory infection by respiratory virus panel (RVP) multiplex PCR testing or negative by all testing. The positive predictive agreement (PPA) and negative predictive agreement (NPA) of SARS-CoV-2 DETECTR relative to the CDC qRT-PCR assay were 95% and 100%, respectively, for detection of the coronavirus in 83 total respiratory swab samples.

[0825] FIG. 121 shows heatmaps of SARS-CoV-2 DETECTR assay results for clinical samples with the test interpretation indicated. Results of lateral flow SARS-CoV-2 DETECTR assay (top) quantified by ImageJ Gel Analyzer tools for SARS-CoV-2 DETECTR on 24 clinical samples (12 COVID-19 positive) show 98.6% (71/72 strips) agreement with the results of the fluorescent version of the assay (bottom). Both assays were run with 30-minute amplification, Cas12 reaction signal taken at 10 min. Presumptive positive indicated by (+) in orange (bottom, column 4).

[0826] FIG. 122 shows heatmaps of SARS-CoV-2 DETECTR assay results for clinical samples with the test interpretation indicated. The top plot shows result of fluorescent SARS-CoV-2 DETECTR assay on an additional 30 COVID-19 positive clinical samples (27 positive, 1 presumptive positive, 2 negative). Presumptive positive indicated by (+) in orange (top, column 9). The bottom plot shows result of fluorescent SARS-CoV-2 DETECTR assay on an additional 30 COVID-19 negative clinical samples (0 positive, 30 negative).

[0827] Relative to the CDC qRT-PCR protocol, the SARS-CoV-2 DETECTR assay was 90% sensitive and 100% specific for detection of the coronavirus in nasal swab samples, corresponding to positive and negative predictive values of 100% and 91.7%, respectively. FIG. 108G shows performance characteristics of the SARS-CoV-2 DETECTR assay. fM denotes femtomolar; NTC denotes no-template control; PPV denotes positive predictive value; NPV denotes negative predictive value. 83 clinical samples (41 COVID-19 positive, 42 negative) were evaluated using the fluorescent version of the SARS-CoV-2 DETECTR assay. One sample (COVID19-3) was omitted due to failing assay quality control. Positive and negative calls were based on criteria described in FIG. 107E. fM denotes femtomolar; NTC denotes no-template control; PPA denotes positive predictive agreement; NPA denotes negative predictive agreement.

[0828] SARS-CoV-2 DETECTR assay (RT-LAMP+Cas12a) was evaluated on IVT RNA products from SARS-CoV-2, SARS-CoV, bast-SL-CoVZC45, and clinical samples from common human coronaviruses. FIG. 113 shows the results of a DETECTR assay to determine the cross-reactivity of gRNAs for different human coronavirus strains. Samples containing in vitro transcribed RNA of the SARS-CoV-2 N-gene, the SARS-CoV N-gene, the bat-SL-CoVZC45 N-gene, the SARS-CoV-2 E-gene, the SARS-CoV E-gene, or the bat-SL-CoVZC45 E-gene, or clinical samples positive for CoV-HKU1, CoV-299E, CoV-OC43, or CoV-NL63 were tested. HeLa total RNA was tested as a positive control for RNase P, and a sample lacking a target nucleic acid (“NTC”) was tested as a negative control. The N-gene was detected using a gRNA corresponding to SEQ ID NO: 323. The E-gene was detected using a gRNA corresponding to SEQ ID NO: 325. RNase P was detected using a gRNA corresponding to SEQ ID NO: 330. The SARS-CoV-2 DETECTR assay was positive only from the in vitro transcribed SARS-CoV-2 spiked samples and nasal swab samples from SARS-CoV-2 infected patients, indicating that the DETECTR assay was specific for SARS-CoV-2. The N-gene was only detected in SARS-CoV-2, whereas the E-gene was detected only in SARS-CoV-2 and bat-SL-CoVZC45. SARS-CoV E-gene was not detected as the RT-LAMP primer set was not capable of amplifying the SARS-CoV E-gene, even though the E-gene gRNA was capable of detecting the SARS-CoV E-gene target site. RNase P was detected in common human coronaviruses because these samples are RNA extracted from clinical samples. Result are shown at 15 minutes of LbCas12a (SEQ ID NO: 27) detection assay signal on fluorescent plate reader. FIG. 113 shows the target on the x-axis, which from left to right are SARS-CoV-2 N-gene, SARS-Cov N-gene, bat-SL-CovZC45 N-gene, SARS-2 E-gene, SARS-CoV E-gene, Bat-SL-CoVZC45 E-gene, Cov-HKUI, Cov-299E, Cov-OC43, Cov-NL63, HeLa total RNA, and NTC. Within each target group are three bars, which from left to right show varying gRNA including N-gene, E-gene, and RNaseP. The y-axis shows raw fluorescence in arbitrary units (AU) ranging from 0 to 3000 in increments of 1000.

[0829] FIG. 115A-FIG. 115B show DETECTR kinetic curves on COVID-19 infected patient samples. Ten nasal swab samples from 5 patients (COVID19-1 to COVID19-10) were tested for SARS-CoV-2 using two different genes, N2 and E as well as a sample input control, RNase P. FIG. 115A shows using the standard amplification and detection conditions, 9 of the 10 patients resulted in robust fluorescence curves indicating presence of the SARS-CoV-2 E-gene (20 minute amplification, signal within 10 minutes). FIG. 115B shows the SARS-CoV-2 N-gene required extended amplification time to produce strong fluorescence curves (30 minute amplification, signal within 10 minutes) for 8 of the 10 patients. FIG. 115C shows that as a sample input control, RNase P was positive for 17 of the 22 total samples tested (20 minute amplification, signal within 10 minutes).

### Example 50

### Improved Detection of an RNase P POP7 Control Gene with Modified LAMP Primers and gRNA

[0830] This example describes improved detection of an RNase P POP7 control gene with modified LAMP primers and gRNA. Samples containing RNase P POP7 RNA were assayed using RT-LAMP and DETECTR reactions to assess the amplification and detection efficiency of primer sets and gRNAs directed to RNase P POP7. Samples containing either 0.16 ng/μL total RNA or 0 ng/μL total RNA were amplified by RT-LAMP with different primer sets at 60° C. for 60 minutes. FIG. 123 shows the time to result for RT-LAMP amplification of RNase P POP7 with different primer sets. Time to result was determined for samples amplified with primer sets 1-10. Primer set 1 corresponds to SEQ ID NO: 360-SEQ ID NO: 365, and primer set 9 corresponds to SEQ ID NO: 366-SEQ ID NO: 371. Primer set 9 showed improved time to result over primer set 1 and primer sets 2-8 and 10 for samples containing 0.16 ng/μL total RNA. Additionally, primer set 9 showed less non-specific amplification of samples without total RNA (0 ng/μL total RNA) than primer set 1 and primer sets 2, 3, 7, 8, and 10.

[0831] A DETECTR reaction was performed on the amplicons generated by RT-LAMP. Samples were detected using gRNAs corresponding to R779 (SEQ ID NO: 330), R780 (SEQ ID NO: 332), or R1965 (SEQ ID NO: 331). FIG. 124 shows raw fluorescence over time of a DETECTR reaction performed on RNase P POP7 amplified using RT-LAMP with primer set 1 or primer set 9 and detected with R779, R780, or R1965 gRNAs. The DETECTR reaction was carried out at 37° C. for 90 minutes. The amplicon generated by the set 1 primers were detected without background (dotted line) by R779. Clean detection was also seen by R1965 and R780 on amplicons generated by set 9. The results show that R1965 detects faster than R779 or R780. FIG. 124 shows two line graphs of DETECTR reactions. The graph on the left shows sett (original) and the graph on the right shows set9. Within each graph are three crRNA including R779, R780, and R1965. Solid lines indicate 0.16 ng/ul of total RNA and dashed lines indicate 0 ng/ul. The x-axis shows time in minutes ranging from 0 to 30 in increments of 10. The y-axis shows raw fluorescence in arbitrary units (AU) from 0 to 60000 in increments of 20000. In the left graph, R1965 shows the highest signal most quickly, followed by R779, and R1965 at a total RNA of 0 ng/ul. In the right graph, R1965 shows the highest signal most quickly followed by R780.

[0832] The limit of detection was then tested for RNase P POP7 amplified using RT-LAMP with primer set 1 (SEQ ID NO: 360-SEQ ID NO: 365) or primer set 9 (SEQ ID NO: 366-SEQ ID NO: 371) and detected with R779 gRNA (SEQ ID NO: 330) or R1965 gRNA (SEQ ID NO: 331). FIG. 125A shows the time to result of RNase P POP7 detection in samples containing 10-fold dilutions of total RNA amplified using RT-LAMP with primer set 1 or primer set 9. Amplification was carried out at 60° C. for 30 minutes. FIG. 125B shows a DETECTR reaction of the RNase P POP7 amplicons shown in FIG. 125A and detected using gRNA 779 (SEQ ID NO: 330) or gRNA 1965 (SEQ ID NO: 331). Samples amplified using primer set 1 were detected with gRNA 779 and samples amplified with primer set 9 were detected with gRNA 1965. The DETECTR reaction was carried out at 37° C. for 90 minutes. Primer set 9 showed improved time to limit of detection, as seen by a faster time to result at low RNA concentrations, compared to primer set 1. Additionally, primer set 9 showed improved speed and sensitivity in a DETECTR reaction when detected with gRNA 1965 as compared to samples amplified with primer set 1 and detected with gRNA 779. FIG. 125A shows a bar graph titled RT-LAMP RNase P POP7-LAMP. The x-axis shows concentration, which from left to right include 2 ng/ul, 0.2 ng/ul, 0.02 ng/ul, 0.002 ng/ul, 0.0002 ng/ul, 0.00002 ng/ul, 0.000002 ng/ul, and 0 ng/ul. The y-axis shows time to result in minutes ranging from 0 to 30 in increments of 10. Within each group on the x-axis are two bars indicating the primer set used, which from left to right are sett (original) and set9. FIG. 125B shows line graphs titled RNase P POP7 primer set comparison—DETECTR. The x-axis on each graph shows the time in minutes ranging from 0 to 30 in increments of 10. The y-axis on each graph shows the raw fluorescence in arbitrary units (AU) ranging from 0 to 50000 in increments of 10000. The graphs from left to right show decreasing concentrations of 2 ng/ul, 0.2 ng/ul, 0.02 ng/ul, 0.002 ng/ul, and 0 ng/ul. Within each graph are two lines which are varying crRNA including R779 and R1965. In the left most graph, while both crRNA eventually reach the same raw fluorescence value, the R1965 line reaches max fluorescence more quickly. In the second graph from the left, while both crRNA eventually reach the same raw fluorescence value, the R1965 line reaches max fluorescence more quickly. In the third graph from the left, while both crRNA eventually reach the same raw fluorescence value, the R1965 line reaches max fluorescence more quickly. In the fourth graph from the left, the R1965 line reaches the highest max fluorescence most quickly.

### Example 51

### Viral Lysis Buffer for Lysis and Amplification of a Coronavirus

[0833] This example describes a viral lysis buffer for lysis and amplification of a coronavirus. Nasal swab or saliva samples are collected from individuals suspected of having a coronavirus infection. Nasal swab and saliva samples are suspended in a viral lysis buffer formulated to lyse the viral capsids and release the viral genome. The viral lysis buffer is compatible with RT-LAMP amplification of the viral genome and DETECTR detection of a target nucleic acid, providing a one-step sample preparation solution for a coronavirus DETECTR reaction.

### Example 52

### Detection of a SNP Using a DETECTR Assay on a Microfluidic Cartridge

[0834] This example describes detection of a SNP using a DETECTR assay on a microfluidic cartridge. This assay was performed on a microfluidic cartridge shown in FIG. 126B. A cartridge manifold for configured to heat the cartridge was turned on. 5 μL of a sample from a blue-eyed individual was combined with 45 μL of a LAMP master mix solution containing the components for LAMP amplification of the sample. The sample was pre-mixed before being added to the cartridge. The pre-mixed sample was loaded into the cartridge in the amplification chamber, and the chamber was sealed with clear tape. 95 μL of blue eye RNP (G SNP) was loaded into the DETECTR chamber. The loaded chip was transferred onto the pre-heated manifold and sealed with clear tape.

[0835] The first heater of the manifold was set to 60° C., and the second heater was set to 37° C. The sample was incubated for 30 minutes at 60° C. After 30 minutes, a first pump in the manifold was initiated to pump the LAMP buffer with the sample through the cartridge. A second pump in the manifold was initiated to push 95 μL of the DETECTR solution into the detection chamber. The sample was incubated at 37° C. for 30 minutes. Fluorescence was visualized using a black box fluorescence detector.

[0836] A control assay was performed in microcentrifuge tubes using a heating block. In a first tube, 5 μL of a sample from a blue-eyed individual was combined with 45 μL of a LAMP master mix solution. In a second tube, 5 μL of a sample from a brown-eyed individual was combined with 45 μL of a LAMP master mix solution. Samples were incubated for 30 minutes at 60° C. in a mini dry bath. 5 μL of each amplified sample was transferred to 95 μL of a 1× RNP solution for detection of A and G SNPs. The reactions were transferred to a 37° C. heat block.

### Example 53

### Amplification and Detection of a SNP in a Microfluidic Cartridge

[0837] This example describes amplification and detection of a SNP in a microfluidic cartridge. These assays were performed in the microfluidic cartridge illustrated in FIG. 128B. The following solutions were prepared: LAMP master mix (1× IsoAmp Buffer (NEB), 4.5 mM MgSO₄, 1.4 mM dNTPs, 1:5 Bst 2.0 (NEB), 1× primer master mix, and 1:10 target DNA), and CRISPR complex (1× MBuffer3, 40 nM crRNA, and 40 nM Cas12 variant (SEQ ID NO: 37); 1 μM reporter substrate was added after incubated at 37° C.).

[0838] PMMA layers of the cartridge were cleaned by immersion in RNAse Zap for 20 minutes and washing of remnants of the cleaning solution by washing twice in nuclease free water. The cartridge was dried using a stream of nitrogen. The layers of the cartridge were assembled. The top half of the CRISPR reaction workflow was blocked with high sol epoxy and dried for 20 minutes until clear. 80 μL of LAMP master mix was pre-mixed in a microcentrifuge tube with 10 μL of primer mix and 10 μL of pure DNA extract. The solution was mixed by pipetting up and down. 70 μL of this solution was loaded into the amplification chamber of the cartridge using a pipette. The chamber was sealed using a small rectangular piece of PCR adhesive (Biorad, MSB-1001).

[0839] The cartridge was placed into a heating manifold, and the aluminum block was heated to an on-chip temperature of 60° C. The sample was incubated at 60° C. for 30 minutes to amplify the sample using LAMP. 100 μL of CRISPR reagent containing a blue-eye gRNA was added to the lower DETECTR chamber. The top and bottom chambers were sealed with small rectangular pieces of PCR adhesive. The CRISPR reagents were mixed with 5 μL of the amplified sample by actuating a valve in the cartridge. The manifold was covered with a shroud of 3D printed APS to block light. The aluminum block was heated to an on-chip temperature of 37° C. The CRISPR reaction was incubated for 30 minutes at 37° C. The resulting fluorescence was observed by eye.

[0840] The assay was repeated as described above using the cartridge illustrated in FIG. 128C, except that the top half was not sealed with epoxy. In both assays, the fluorescence corresponding to a positive result was observable by eye. Illumination of the cartridges in the manifold from the top of the cartridge resulted in uneven illumination of the detection chambers.

### Example 54

### Amplification and Detection of a SNP in a Revised Microfluidic Cartridge

[0841] This example describes amplification and detection of a SNP in a revised microfluidic cartridge. This assay was performed on a microfluidic cartridge illustrated in FIG. 129A. LAMP master mix and CRISPR complex solutions were prepared as described in EXAMPLE 53. PMMA layers of the cartridge were cleaned by immersion in RNAse Zap for 20 minutes and washing of remnants of the cleaning solution by washing twice in nuclease free water. The cartridge was dried using a stream of nitrogen. The layers of the cartridge were assembled.

[0842] 40 μL of LAMP master mix was pre-mixed in a microcentrifuge tube with 5 μL of primer mix and 5 μL of pure DNA extract. The solution was mixed by pipetting up and down. 50 μL of this solution was loaded into the amplification chamber of the cartridge using a pipette. The chamber was sealed using a small rectangular piece of PCR adhesive (Biorad, MSB-1001). 95 μL of the CRISPR reagent solution containing a Cas12 variant (SEQ ID NO: 37) and a gRNA directed to a brown-eye SNP was added to the lower DETECTR chamber, and 95 μL of a negative reagent solution (5× MBuffer3) was added to the upper DETECTR chamber. The chamber was sealed using a small rectangular piece of PCR adhesive (Biorad, MSB-1001).

[0843] The cartridge was assembled on a heating manifold, and the aluminum block was heated to an on-chip temperature of 60° C. at the amplification chamber. Heating was initiated 2 minutes prior to beginning the assay. Amplification was performed at 60° C. for 30 minutes. The valve of the cartridge was actuated to mix the CRISPR reagent with 5 μL of the amplified sample. The manifold heater of the detection chamber was heated to 37° C. without pre-heating. The DETECTR reaction was performed at 37° C. for 30 minutes, and the resulting fluorescence was observed by eye. The chambers were imaged by illuminating with either an LED from a mini PCR kit or an LED from ThorLabs.

[0844] The assay was repeated on a new cartridge of the same design with the following modifications: the CRISPR reagents were not preloaded into the device, because the heater was still warm from the previous run, and the amplification and detection steps were run for 15 minutes instead of 30 minutes.

[0845] A third assay was performed on a microfluidic cartridge illustrated in FIG. 129B. The amplification chamber was loaded with 50 μL of nuclease free water and the chamber was sealed with a small piece of PCR adhesive. 50 μL of 1 μM ATTO-488 dye and 45 μL of nuclease free water were loaded into the lower CRISPR chamber, and 95 μL of nuclease free water was loaded into the upper CRISPR chamber. Both chambers were sealed with a small piece of PCR adhesive. The cartridge was assembled on a heating manifold, as shown in FIG. 137B. Samples were incubated for 10 seconds in the amplification chamber. The first pump was run for 3 seconds to drive 5μL of fluid out of the amplification chamber and into the CRISPR chamber (also referred to as the detection chamber). The second pump was run for 5 seconds to drive detection reagents into the CRISPER chamber. The samples were incubated in the CRISPR chamber for 10 seconds before illuminating with an LED. The assay was repeated with the following parameters: 30-minute incubation in the amplification chamber, pump 1 run for 1 second, pump 2 run for 20 seconds, and 15-minute incubation in the CRISPR chamber before illuminating with an LED. The longer pump times improved fluid transfer between chambers.

### Example 55

### Use of a Microfluidic Device for a DETECTR Reaction

[0846] This example describes use of a microfluidic device for a DETECTR reaction. A microfluidic cartridge as illustrated in any of FIG. 126A, FIG. 126B, FIG. 127A, FIG. 127B, FIG. 128A, FIG. 128B, FIG. 128C, FIG. 128D, FIG. 129A, FIG. 129B, FIG. 129C, or FIG. 129D is loaded with amplification reagents and DETECTR reagents. 50 μL of amplification reagent is added to the amplification chamber, and 95 μL of DETECTR reagent is added to DETECTR chamber. The wells of the cartridge are sealed. The cartridge is loaded into a heating manifold as illustrated in any of FIG. 136A, FIG. 136B, FIG. 137B, FIG. 137C, or FIG. 138A-B. The cartridge is inserted in a specific orientation. Screws are tightened to hold the cartridge in place. Openings are sealed with clear qPCR tape cut to size to create an air-tight seal. A thermocouple is inserted into the amplification chamber to record temperatures. The solenoid, shown in FIG. 130A, is energized to close the valve. Indicator LED lights turn on. Two heaters, set to 60° C. and 37° C., are turned on. The sample is incubated at 60° C. for 30 minutes in the amplification chamber. The solenoid is de-energized to open the valve. Pump 1 is activated for 15 seconds to move fluid from the amplification chamber to the DETECTR reaction chambers. After 15 seconds, pump 2 is activated for 15 seconds to move fluid from the DETECTR reagent reservoirs to the DETECTR reaction chambers. The sample is incubated in the DETECTR reaction chambers for 30 minutes at 37° C. The indicator light turns off. The LED is turned on and fluorescence is measured by image, visual assessment, or photodiode detection.

[0847] At the end of the 30-minute 60° C. LAMP incubation, the solenoid valve opens and the peristaltic pump #1 engages at 100% PWM for 10 seconds. The LAMP buffer is pumped through the valve to the intersection of the serpentine channels leading to the DETECTR reaction chambers and the straight channels leading to the DETECTR reagent reservoirs. The serpentine channel leading to the DETECTR reaction chambers has a larger cross-sectional area than the channel leading to the DETECTR reagent reservoirs. This is intended to reduce the fluidic resistance in the serpentine channels and direct all of the buffer towards the DETECTR reaction chambers. However, throughout this study (testing 23+ chips), the buffer has split both ways nearly every time, with approximately half the buffer volume going the wrong way. In the next fluidic step, the solenoid valve closes and DETECTR reagent is pumped towards the DETECTR reaction chambers, collecting the LAMP product along the way. This provides some mixing as both buffers travel through the serpentine channels simultaneously, but this process also creates bubbles that can get carried to the DETECTR chamber.

[0848] To prevent bubbles from interfering with fluorescence measurements during DETECTR, a larger volume of buffer is loaded into the reservoirs than the reaction chambers can fit and use a longer pumping time than necessary. This ensures that the chambers are completely filled with reagent and all bubbles have been popped. The DETECTR reaction chambers have a 70 μL volume, and 25 μL LAMP plus 95 μL DETECTR reagent are delivered into each chamber. The second fluidic step (DETECTR reagent to the DETECTR reaction chambers) takes about 20-30 seconds to deliver all the buffer, but this step is run for 45 seconds. This results in completely full DETECTR reaction chambers, with the excess reagents backed up in the serpentine channels. In addition to bubbles, if the DETECTR reaction chambers are not completely filled, condensation forms on the top of the chamber during the 37° C. incubation, which also interferes with fluorescence measurements taken from above.

### Example 56

### Thermal Testing of a Microfluidic Device for a DETECTR Reaction

[0849] This example describes thermal testing of a microfluidic device for a DETECTR reaction. The thermal performance of a heating manifold was tested by measuring the time to temperature and the accuracy of heating to the setpoints with thermocouples submerged within the buffer. Under standard assay temperature setpoints (60° C. LAMP/37° C. DETECTR), the LAMP buffer heats to 60° C. in 8.5 minutes, but the DETECTR buffer reaches a maximum temperature of 34° C. at around 21 minutes. This is somewhat counterintuitive, since it takes longer to hit a lower temperature (and the DETECTR buffer does not reach the setpoint temperature). To hit a specific temperature, the heater controller varies the amount of time it spends in the on state. This state switching is quantified by the pulsed width modulation (PWM) value, the percentage of a given unit of time it spends in the on state. The heater controller also samples the temperature of the heater for feedback on the difference between the current temperature and the setpoint temperature. The larger the difference between those two values, the higher the resulting PWM value will be. As the heater temperature approaches the setpoint, the PWM value drops to slow the rate of change and avoid overshooting the setpoint temperature. The difference between the room temperature heater and the LAMP setpoint is about 35° C., while the difference between the DETECTR heater and its setpoint is about 12° C. The LAMP incubation heats with maximum PWM values around 20%, and the DETECTR incubation heats with maximum PWM values around 12%. Our current setup is designed with a larger emphasis on accuracy and not overshooting the setpoint temperature than heating the buffer to assay temperature quickly.

[0850] Specific PWM values can be used to heat to our setpoint temperatures faster. However, this is a manual process and can result in overshooting the target temperatures and damaging the manifold prototype and melting the microfluidic chip. With the LAMP heater PWM value set to 100%, the LAMP buffer (measured by thermocouple) heats to 60° C. in 90 seconds, but the heater temperature hits 100° C. With the DETECTR heater PWM set to 100%, the DETECTR buffer heats to 37° C. in 60 seconds, and the heater hits 80° C. Turning the heater off when the DETECTR buffer hits 37° C. results in a maximum buffer temperature of around 60° C. the temperature of the DETECTR side of the chip rises during the 30-minute 60° C. LAMP incubation so that it is higher than room temperature. It varies from time to time, but it is usually between 25-29° C. by the beginning of the DETECTR side.

[0851] FIG. 139A, FIG. 139B, FIG. 140A, and FIG. 140B show thermal testing summaries for an amplification chamber heated to 60° C. (FIG. 139A and FIG. 140A) or a DETECTR chamber heated to 37° C. (FIG. 139B and FIG. 140B). FIG. 140A shows a graph titled BOBv2 LAMP Temperature vs Time (61° C. setpoint). The x-axis shows time in seconds from 0 to 1800 in increments of 200. The y-axis shows temperature in ° C. ranging from 20 to 65 in increments of 5. The graph includes two lines representing heater and buffer. While both the heater and buffer lines reach the same temperature eventually, the heater line achieves the max temperature more quickly. FIG. 140B shows a graph titled BOBv2 LAMP Temperature vs Time (40° C. setpoint). The x-axis shows time in seconds from 0 to 1800 in increments of 200. The y-axis shows temperature in ° C. ranging from 25 to 43 in increments of 2. The graph includes two lines representing heater and buffer. The heater line reaches a higher temperature more quickly.

### Example 57

### Detection of a HERC2 SNP Using a Microfluidic Cartridge

[0852] This example describes detection of a HERC2 SNP using a microfluidic cartridge. A primer mix containing 2 μM F3 primer, 2 μM B3 primer, 16 μM FIP primer, 16 μM BIP primer, 8 μM LF primer, and 8 μM LB primer in nuclease free water was prepared. A complexing reaction containing 1× MBuffer3, 40 nM crRNA, and 50 nM Cas12 variant (SEQ ID NO: 37) was prepared. 40 nM reporter substrate was added after incubating at 37° C. for 30 minutes. A LAMP mix containing 1× IsoAmp Buffer, 4.5 mM MgSO₄, dNTPs, and 1× primer mix was prepared. DETECTR reagents were loaded into a microfluidic cartridge and wells were sealed with PCR tape. LAMP mix was mixed with primers and loaded into the cartridge. The narrow end of the Chip Shop tank was covered with parafilm and inserted into the luer connection above the LAMP reaction chamber. The Chip Shop tank was loaded with 200 μL of 20 mM NaOH. The cartridge was inserted into the heating manifold and screws were tightened. A buccal swab was added to the tank, gently agitated, and incubated for 2 minutes. A Drummond micropipette was used to deliver 10 μL of lysed sample through parafilm into LAMP reaction chamber. The tank was removed and the chamber was sealed with qPCR tape cut to size.

[0853] FIG. 141A shows the DETECTR results run on a plate reader at a gain of 100, using the LAMP product from the microfluidic cartridge as an input. The samples were run in duplicate with a single non-template control (NTC). 19 μL of the DETECTR master mix (the same mixture used on the device) was pipetted into wells of a 384-well plate and 1 μL of LAMP amplicon was added. For one sample, 10 μL of amplicon was inadvertently added; that sample is represented by “10 μL target”. Because the donor is homozygous for the A-SNP, guide R570 was expected to generate a faster signal than R571. A slight difference was observed between the two samples. FIG. 141A shows a line graph with the x-axis showing time in minutes ranging from 0 to 30 in increments of 10 and the y-axis shows raw fluorescence in arbitrary units (AU) ranging from 0 to 60000 in increments of 20000. The bottom two flat lines are R570 NTC and R571 NTC. The lines achieving high signal rapidly include, from left to right, R570 10 ul, R 570 1 ul, and R571 1 ul.

[0854] FIG. 141B shows three LAMP products run on a plate reader using samples from a microfluidic chip. The LAMP reactions are numbered in the order that the chips were run (LAMP_1 was run first, etc.). The donor was homozygous for SNP A and, accordingly, crRNA 570 comes up first. The ATTO 488 was used as a fluorescence standard. These measurements were taken on a plate reader at a gain of 60. Results of the three LAMP reactions were clustered close together, which indicated good run-to-run reproducibility for amplification on the microfluidic cartridge and heating manifold. Each LAMP reaction was run in triplicate with each crRNA, generating the error ranges visible in the graph. FIG. 141B shows a line graph with the x-axis showing time in minutes ranging from 0 to 30 in increments of 10 and the y-axis shows raw fluorescence in arbitrary units (AU) ranging from 0 to 8000 in increments of 2000. The flat lines near the bottom of the graph are 10 nM ATT0488 None and NTC. The flat dashed line near 6000 AU is 100 nM ATT0488 None. The lines achieving high signal rapidly include, from left to right approximately, LAMP_1 R570 and LAMP_3 R570, LAMP_2 R570, LAMP_3 R571, LAMP_1 R571, and LAMP_2 R571.

[0855] Another assay was performed. Solutions were prepared as described above, and samples were run on a microfluidic cartridge shown in FIG. 129A with addition of a luer connector on top of the amplification chamber. A buccal swab sample was prepared as described above. The cartridge was loaded, and the assay was run with the following settings: 30 minutes amplification, 10 seconds Pump 1, 40 seconds Pump 2, 30 minutes DETECTR. Samples were measured on a plate reader. FIG. 142A an image of the microfluidic cartridge after the assay. The bluer appearance of the right well compared to the green appearance of the left well is likely due to the bubbles in the right well diffusing the input blue light. FIG. 142B shows results of a DETECTR reaction measured on a plate reader after 30 minutes of LAMP amplification. The bubbles in the one reaction chamber interfered with the signal from the ESE log, so the quantitative measurements shouldn't be trusted. However, the 10 minute and 20-minute timepoints had similar signals. Furthermore, both wells appeared visually bright when the LEDs turned on after 30 minutes of DETECTR. The DETECTR results on the plate reader showed that after 30 minutes the signal was high for both SNPs. FIG. 142B shows line graphs from left to right titled R570, R571, and None. The x-axis on each graph shows time in seconds ranging from 0 to 80 in increments of 20 and the y-axis on each graph shows raw fluorescence in arbitrary units (AU) ranging from 0 to 60000 in increments of 20000. In the leftmost graph, the NTC line is flat at the bottom, while the extracted DNA line achieves high fluorescence signal rapidly. In the middle graph, the NTC line is flat at the bottom, while the extracted DNA line achieves high fluorescence signal rapidly. In the right graph, the 10 nM ATTO line is flat at the bottom, the 10 nM ATTO line is flat near the middle, and the 100 nM ATTO line is flat at the top.

### Example 58

### Detection of a Coronavirus Using a Microfluidic Cartridge

[0856] This example describes detection of a coronavirus using a microfluidic cartridge. A complexing reaction containing 1× MBuffer3, 40 nM crRNA, and 50 nM Cas12 variant (SEQ ID NO: 37) was prepared. 40 nM reporter substrate was added after incubating at 37° C. for 30 minutes. 95 μL DETECTR reagents were loaded into each DETECTR reagent well and sealed with qPCR tape. A tube of N Gene LAMP master mix (537 μL) was mixed with 32 μL of 100 mM MgSO₄ and 40 μL of mixture was loaded into a cartridge. 10 μL of Twist SARS-Cov-2 standard was added at various copies/μL or 1× TE as a negative control to LAMP reaction chamber. The cartridge was inserted into the manifold and tightened. The LAMP reaction chamber was sealed with qPCR tape. Temperatures were set (62° C. LAMP, 40° C. DETECTR (to account for thermal offset)) and automated workflow was initiated. A 3D-printed optical cover was placed on the cartridge to minimize optical noise. DETECTR measurements were taken at 0 min, 2 min, 5 min, 10 min, 20 min, and 30 min. The copy number of RNA in the LAMP reaction was varied in order to estimate the lower limit of detection in the device.

[0857] FIG. 143A, FIG. 143B, FIG. 143C, and FIG. 143D show results of the coronavirus DETECTR reaction. The two reaction chambers with 10 copies input to LAMP resulted in a rapidly increasing DETECTR signal. All NTCs were negative. With 10 copies input into LAMP, the DETECTR signal gradually increased over the course of the reaction, as shown in the photodiode measurements below in FIG. 143C. The negative controls in FIG. 143D indicated an absence of contamination.

[0858] The assay was repeated. FIG. 144A, FIG. 144B, FIG. 144C, and FIG. 144D show the results of the repeated coronavirus DETECTR reaction.

### Example 59

### Turnaround Time of an Influenza B DETECTR Assy in a Microfluidic Cartridge

[0859] This example describes the turnaround time of an influenza B DETECTR assay in a microfluidic cartridge. A primer mix containing 2 μM F3 primer, 2 μM B3 primer, 16 μM FIP primer, 16 μM BIP primer, 8 μM LF primer, and 8 μM LB primer in nuclease free water was prepared. A complexing reaction containing 1× MBuffer3, 40 nM crRNA, and 50 nM Cas12 variant (SEQ ID NO: 37) was prepared. 40 nM reporter substrate was added after incubating at 37° C. for 30 minutes. 95 μL DETECTR reagents were loaded into each DETECTR reagent well and sealed with qPCR tape. 40 μL of LAMP mixture was added to the cartridge. 2 μL of 1 pM IBV target was added to 198 μL of viral lysis buffer and loaded into a Chip Shop tank. A Drummond micropipette was used to deliver 10 μL of lysed sample through parafilm into LAMP reaction chamber. The tank was removed and the chamber was sealed.

[0860] FIG. 145A, FIG. 145B, FIG. 146A, FIG. 146B, and FIG. 146C show the photodiode measurements for an influenza B DETECTR reaction in a microfluidic cartridge. 10 minutes of amplification time resulted in an increase in signal above the background (this was observed visually as well). 5 minutes of amplification time did not result in a visible increase in signal. FIG. 145A shows line graphs titled Aggregated DETECTR signals: IBV LAMPrey Time point Testing on the detection manifold. The x-axis shows time in minutes ranging from 0 to 25 in increments of 5. The y-axis shows raw fluorescence ranging from 0 to 0.5 in increments of 0.1. The 3 lines near the middle are 15 min LAMP, 5 min LAMP, and NTC with the topmost line of the 3 liens being 15 min lamp. The topmost line in the graph is 10 min LAMP. FIG. 145B shows line graphs titled DETECTR Signal: 15 min IBV LAMP. The x-axis shows time in minutes ranging from 0 to 30 in increments of 10. The y-axis shows raw fluorescence ranging from 0 to 0.5 in increments of 0.1. The two lines near the middle are Channel 1 and Channel 2, with the Channel 1 line being higher.

### Example 60

### A DETECTR Assay Utilizing Reagents Stored in Glass Capillaries

[0861] This example describes the use of glass capillaries in a DETECTR reaction. Glass capillaries can enable fluid flow by passive capillary action, thereby obviating the need for power-driven flow (e.g., with mechanical pumps). Glass capillaries are also capable of long-term, stable reagent storage.

[0862] The reagents required for a DETECTR reaction are provided in inside of the capillaries in dry form. Hydrating the capillaries solubilizes the reagents, and allows them to be eluted from the capillaries into a collector compartment or container. CRISPR-Cas complexes may be stored and recollected in this fashion without loss of activity.

[0863] DETECTR reagent mixes were prepared by pre-complexing a guide nucleic acid of SEQ ID NO: 374 with 5 μM of a programmable nuclease with SEQ ID NO: 37 in 5× MBuffer2 (20 mM Tris HCl, pH8, 100 mM NaCl, 5 mM MgCl2, 1 mM DTT, 5% glycerol, 50 ug/mL Heparin). 23.5 mm capillaries with 20 μl volume capacities were loaded with 0.5 μl droplets of a reagent mix and then dried at room temperature overnight. After 212 days, the capillaries were rehydrated with 20 μl aliquots of 5× MBuffer2 containing either 0 μM or 0.170 μM ssDNA substrates with fluorescent reporters and either 0 μM, 0.1 μM, or 1 μM target nucleic acid. The sequences of the guide nucleic acid, ssDNA substrates, and target nucleic acid are provided in TABLE 24 below. Following 2 minutes of room temperature rehydration, the contents of each capillary were expunged into separate wells on a 384-well plate. The wells were incubated at 37° C. for 90 minutes, during which time a fluorescence readout was monitored from each well.

TABLE 24

| Species | SEQ ID NO | Sequence |
|---|---|---|
| Guide nucleic | SEQ ID NO: | GGCUGGCCAAACUGCUGGGU |
| acid (R435) | 374 | |
| Reporter | SEQ ID NO: 9 | /56-FAM/TTATTATT/3IABkFQ/ |
| nucleic acid | | |
| rep01 | | |
| Target nucleic | SEQ ID NO: | TGGTCCCCGCCACCCCCCACCCCCACTTTGCAGA |
| acid | 375 | TAAACCACATGCAGGAAGGTCAGCCTGGCAAGT |
| | | CCAGTAAGTTCAAGCCCAGGTCTCAACTGGGCA |
| | | GCAGAGCTCCTGCTCTTCTTTGTCCTCATATACG |
| | | AGCACCTCTGGACTTAAAACTTGAGGAACTGGA |
| | | TGGAGAAAAGTTAATGGTCAGCAGCGGGTTACA |
| | | TCTTCTTTCATGCGCCTTTCCATTCTTTGGATCAG |
| | | TAGTCACTAACGTTCGCCAGCCATAAGTCCTCG |
| | | ACGTGGAGAGGCTCAGAGCCTGGCATGAACATG |
| | | ACCCTGAATTCGGATGCAGAGCTTCTTCCCATGA |
| | | TGATCTGTCCCTCACAGCAGGGTCTTCTCTGTTT |
| | | CAGGGCATGAACTACTTGGAGGACCGTCGCTTG |
| | | GTGCACCGCGACCTGGCAGCCAGGAACGTACTG |
| | | GTGAAAACACCGCAGCATGTCAAGATCACAGAT |
| | | TTTGGGCTGGCCAAACTGCTGGGTGCGGAAGAG |
| | | AAAGAATACCATGCAGAAGGAGGCAAAGTAAG |
| | | GAGGTGGCTTTAGGTCAGCCAGCATTTTCCTGAC |
| | | ACCAGGGACCAGGCTGCCTTCCCACTAGCTGTA |
| | | TTGTTTAACACATGCAGGGGAGGATGCTCTCCA |
| | | GACATTCTGGGTGAGCTCGCAGCAGCTGCTGCT |
| | | GGCAGCTGGGTCCAGCCAGGGTCTCCTGGTAGT |
| | | GTGAGCCAGAGCTGCTTTGGGAACAGTACTTGC |
| | | TGGGACAGTGAATGAGGATGTTATCCCCAGGTG |
| | | ATCATTAGCAAATGTTAGGTTTCAGTCTCTCCCT |
| | | GCAGGATATATAAGTCCCCTTCAATAGCGCAAT |
| | | TGGGAAAGGTCACAGCTGCCTTGGTGGTCCACT |
| | | GCTGTCAAGGACACCTAAGGAACAGGAAAGGC |
| | | CCCATGCGGACCCGAGCTCCCAGGGCTGTCTGT |
| | | GGCTCGTGGCTGGGACAGGCAGCAATGGAGTCC |
| | | TTCTCTCCCTTCACTGGCTCGGTTTCT |

[0864] The results of the DETECTR experiment are shown in FIG. 147. Fluorescence increases were detected for the reactions with 0.17 μM reporter nucleic acid and either 0.1 μM and 1.0 μM target nucleic acid. The results show that the pre-complexed guide nucleic acid-programmable nuclease complexes maintained catalytic activity after air-drying and long-term storage. Rehydration is rapid, making intracapillary desiccation or lyophilization an ideal storage method.

### Example 61

### Spin-Columns for Sequential Amplification and CRISPR Reactions

[0865] This example describes a device that is designed to mix reagents for a nucleic acid amplification reaction and a CRISPR reaction. Amplification reactions and CRISPR reactions often require separate buffers and conditions. Thus, performing sequential amplification and CRISPR reactions on a single sample can require exposing the sample to the surrounding environment. This example describes a multicompartment spin-column that can move a sample through separate compartments containing different reagents while remaining sealed to reduce contamination.

[0866] The spin-column can have the structure illustrated in FIG. 148 panel A. This spin column has a top compartment 101 that can be loaded with CRISPR reagents and a bottom compartment 102 that can be loaded with isothermal amplification reagents. A single cap 103 is capable of sealing both compartments from the exterior environment. The top compartment is isolated from the bottom compartment by a weakly permeable material 104 such as a membrane or filter. Downwards force or pressure within the top compartment can be used to move reagents through the weakly permeable material and into the bottom compartment. This can be achieved by centrifuging the spin-column, compressing the cap, or selectively heating the top compat linent. The top compartment may be removable from the bottom compartment. For example, the top compartment can be a tube that fits within the bottom compartment.

[0867] The spin-column can be used in the method illustrated in FIG. 148. As is shown in panel A, the top compartment is loaded with CRISPR reagents and the bottom compartment can is loaded with amplification reagents and the sample. Both compartments are sealed from the external environment by closing the cap at the top of the spin-column. The sample can then be subjected to an amplification reaction, as shown in panel B. During this phase, the spin-column may be incubated at a temperature suitable for the amplification reaction (e.g., to between 37 and 65° C.). Next, as is shown in panel C, the CRISPR reagents are drawn from the top compartment into the bottom compartment through the weakly permeable material by centrifugation. In panel D, the spin-column can then be incubated at a second temperature suitable for the CRISPR reaction. Optionally, a signal can be detected from the sample through the transparent spin-column material (panel E, e.g., if the CRISPR reaction produces a fluorescence signal).

### Example 62

### Electrochemically Detectable Reporter Molecules for DETECTR Reactions

[0868] This example describes reporter molecules with electrochemically detectable moieties for use in DETECTR reactions. The reporter molecules are ssDNA containing modified thymine nucleobases conjugated to ferrocene moieties and a fluorescent moiety (e.g., fluorescein) conjugated to the 5′ end via a phosphodiester linkage. Reporter molecules may be biotinylated at the 3′ end. The sequences of two ssDNA reporter molecules are 5′-YXXTTATTXX-3′ (SEQ ID NO: 391) and 5′-YXXTTATTATTXXZ-3′ (SEQ ID NO: 392), wherein X is ferrocene labeled thymidine (FIG. 149 panel A), Y is 6-carboxyfluoroscein (FIG. 149 panel B), and Z is a 3′ biotin moiety (FIG. 149 panel C).

[0869] In a DETECTR reaction, the reporter molecules may undergo transcollateral cleavage from a programmable nuclease (e.g., a Cas12 variant having a sequence of SEQ ID NO: 37). Reporter molecule cleavage mobilizes electrochemically detectable, ferrocene containing ssDNA subunits. Ferrocene has a relatively high oxidation potential, and thus can be potentiometrically detected against a background of low oxidation potential biomolecules. The magnitude of the electrochemical signal increases with cleavage of the reporter molecules. In contrast, the intensity of the fluorescence signal from the reporter molecules is invariant to the degree of transcollateral cleavage. Thus, a fluorescence readout can be used to calibrate the electrochemical measurements by quantifying the total concentration of reporter molecules present, and the combination of electrochemical and fluorescence measurements can be used to determine the fraction of reporter molecules which have been cleaved. The biotin serves as a capture moiety for the reporter or fragments of the reporter (e.g., with streptavidin).

[0870] The assays were performed with a 5′-YXXTTATTXX-3′ (SEQ ID NO: 391) reporter oligonucleotide, a programmable nuclease targeting HERC2, and a HERC2 target nucleic acid. Detection was performed with a DropSens p.STAT ECL instrument and DropSens screen-printed carbon electrodes. Aliquots of the DETECTR reaction were collected at multiple time points after its initiation.

[0871] FIG. 176 shows the results of a DETECTR reaction measured with square wave voltammetry. The reactions utilized 50 fM target nucleic acid and 2.4 μM reporter nucleic acid. As can be seen in FIG. 176, the signal intensities of the oxidation (panel A) and reduction (panel B) curves were greater for the sample collected 33 minutes after initiation of the DETECTR reaction than for the sample collected immediately following initiation of the DETECTR reaction. Error bars represent standard deviation of two measurements of the same solution, using three traces from each measurement.

[0872] FIG. 177 shows the results of DETECTR reactions measured with cyclic voltammetry. The reactions utilized 24 μM reporter nucleic acid and 500 pM target nucleic acid. As can be seen in FIG. 177, the signal increased between the 0 minute and 26 minute timepoints of the DETECTR reactions. Each trace shown in FIG. 177 is the average of three scans, of the same solution. Error bars represent the standard deviations.

### Example 63

### Device for Automating Sequential Amplification and CRISPR Reactions

[0873] This example describes a device capable of performing multiple amplification and CRISPR reactions on a sample. The device is capable of dividing a sample to perform multiple, distinct sequences of amplification and CRISPR reactions on different aliquots of a single input sample. The device houses a microfluidic chip containing multiple compartments for storing reagents and reacting the sample. The device is configured to detect signals produced from the CRISPR reactions (e.g., optical signals), and thus facilitates a plurality of measurements from a single sample input. A possible application of the device is to perform separate series of amplification and CRISPR reactions to assay a single biological sample for a large number of viruses.

[0874] A schematic for the microfluidic chip is depicted in FIG. 150. Upon insertion into the device, a biological sample will be transported a first compartment (V1), where the sample can be combined with a variety of solutions (e.g., lysis buffer) depending on the type of sample and the number and types of assays to be performed. In some assays, V1 will be preloaded with a dilution buffer prior to the sample being loaded. The device can move (e.g., via a pump) a controlled quantity of the sample (e.g., 5 μl) from the first compartment into a second compartment (V2), where it can be mixed with amplification reagents from P1. The device controls the temperature of V2 to facilitate an amplification reaction. The device transports portions of the amplification product from V2 to either V3 or V4, where the sample is mixed with reagents for CRISPR reactions. Sample from V3 and V4 can be transported to waste compartments (V5 and V6, respectively).

[0875] A depiction of the device is provided in FIG. 151. The device is configured to hold the microfluidic chip 101 below a sample inlet port 102. The inlet port contains a projection 103 (e.g., a pneumatically driven needle) that can pull a sample into a first compartment in the microfluidic chip 104. The microfluidic chip can be removed and replaced, and is held over temperature control elements 105 that modulate the temperature within compartments in the microfluidic chip. The device contains a diode array 106 configured to measure absorbance and fluorescence from multiple microfluidic chip compartments. The device utilizes batteries 107 as a power source.

### Example 64

### Flu DETECTR Reaction with Dual Amplification, Viral Lysis Buffer System

[0876] This example describes an assay for detecting flu viral nucleic acids. The assay is a combination of ambient temperature RT-LAMP amplification and guide nucleic acid driven, programmable nuclease-based detection. LAMP protocols often require strict operating temperatures that are unfeasible for implementation in devices that perform multiple types of reactions. For example, the high temperatures required for some amplification reactions can damage reagents for CRISPR reactions. This example discloses activators for LAMP amplification that are operable at a range of temperatures, including ambient temperatures, that are more suitable for implementation within a device. This example also provides viral lysis buffers containing the LAMP activators, enabling concurrent lysis and amplification upon input of a sample, such as a swab containing nucleic acids associated with the flu.

[0877] A variety of potential LAMP activators were tested for LAMP activating capacity and viral lysis buffer compatibility. LAMP activating capacity was evaluated by performing dual LAMP-DETECTR assays in the absence of individual LAMP activators. In these assays, LAMP was performed with three out of four of a buffering agent, an activator, dNTPs, and primer. The DETECTR reactions were performed on buccal swab samples with SEQ ID NO: 37 and the guide nucleic acid (targeting HERC2) given in TABLE 25 below. The DETECTR reactions were monitored by fluorescence over 90 minutes. A separate control assay was performed with all four reagents present during the LAMP amplification. As shown in FIG. 152, the LAMP reactions were inhibited by the absence of any of the four reagents. Different extraction conditions are shown in the two columns. The left column shows crude lysis, and the right column shows a standard commercial extraction method.

TABLE 25

| Species | SEQ ID NO | Sequence |
|---|---|---|
| Guide nucleic acid | SEQ ID NO: | UAAUUUCUACUAAGUGUAGAUAGCAUUAAGU |
| | 256 | GUCAAGUUCU |
| Reporter nucleic | SEQ ID NO: 9 | /5Alex594N/TTATTATT/3IAbRQSp/ |
| acid | | |
| Target nucleic acid | SEQ ID NO: | TAACTCTGAAAACATTTCTAGTCTTGTAATCAAC |
| | 376 | ATCAGGGTAAAAATCATGTGTTAATACAAAGGT |
| | | ACAGGAACAAAGAATTTGTTCTTCATGGCTCTC |
| | | TGTGTCTGATCCAAGAGGCGAGGCCAGTTTCAT |
| | | TTGAGCATTAAGTGTCAAGTTCTGCACGCTATC |
| | | ATCATCAGGGGCCGAGGCTTCTCTTTGTTTTTAA |
| | | TTAATTGTTTTTAACTGTGAGTTTATATACACTT |
| | | GAAGCA |

[0878] FIG. 153 shows the results of dual LAMP-DETECTR assays targeting a flu nucleic acid. Panels in the first and third columns show negative results for LAMP reactions lacking an activator. Samples were detected with a gRNA corresponding to SEQ ID NO: 377 (UAAUUUCUACUAAGUGUAGAUAGCUGCUCGAAUUGGCUUUG R1463) targeted to a target sequence corresponding to SEQ ID NO: 378 (AGCAGAAGCAGAGGATTTGTTTAGTCACTGGCAAACAGGAAAAAAAAATGGCGGA CAACAACATGACCACAACACAAATTGAGGTGGGTCCGGGAGCAACCAATGCCACCA TAAACTTTGAAGCAGGAATTCTGGAGTGCTATGAAAGGCTTTCATGGCAAAGGGCC CTTGACTACCCTGGTCAAGACCGCCTAAACAGACTAAAGAGAAAATTAGAGTCAAG AATAAAGACTCACAACAAAAGTGAGCCTGAAAGTAAAAGGATGTCTCTTGAAGAGA GAAAAGCAATTGGAGTAAAAATGATGAAAGTACTCCTATTTATGAATCCGTCTGCTG GAATTGAAGGGTTTGAGCCATACT). Panels in the second and fourth column show results for LAMP reactions performed in buffer (panel in second column) and viral lysis buffer (panel in fourth column) in the presence of an activator.

### Example 65

### Multi-Chamber Injection-Molded Cartridge for Parallel Amplification and CRISPR Reactions

[0879] This example describes a fully integrated device capable of performing multiple amplification and DETECTR reactions on one input sample. The device contains an inlet port for inserting a sample, an injection-molded cartridge containing reagents for the amplification and DETECTR reactions, a fluidic system for partitioning a sample for multiple reactions, detection components for analyzing the reactions, and hardware for processing the reactions. Inserting a sample into the inlet port seals the sample within the device, preventing the sample and surrounding environment from contamination.

[0880] FIG. 154 panel (a) shows an injection-molded cartridge. The injection-molded cartridge contains an inlet port 101 for inserting a sample. The bottom of the inlet port is narrow, allowing a swab to snap and seal into place upon insertion. The top of the inlet port is attached to a cap 102 that is configured to hermetically seal the inlet port. The injection-molded cartridge contains fluidic channels 103 (e.g., microfluidic channels) through which samples and reagents can flow, including a metering channel 103a that apportions portions of the sample with defined volumes. The channels are interconnected by locations that can accommodate pumps (e.g., peristaltic pumps, hydraulic pumps, ports connecting to pneumatic pump manifolds, etc.) and switchable vales 104 that direct and meter the fluid flow. Some channels contain or terminate in compartments for reactions 105. The cartridge contains an array of reagent storage compartments 106 coupled to ports 107 for transporting the reagents throughout the fluidic channels and reaction compartments. The injection-molded cartridge is constructed from two pieces 108 & 109 that connect to hermetically seal reagents stored within the cartridge. The injection-molded cartridge chambers further comprise laser bonded sealing layers.

[0881] FIG. 154 panel (b) shows a device capable of housing the injection-molded cartridge. The device contains top 110 and bottom 111 platforms designed to hold the injection-molded cartridge firmly in place. The device contains an array of pumps and switchable valves 112 that control hydraulics within the injection-molded cartridge, and heating elements 113 that modulate temperature within the injection-molded cartridge. A fluorimeter 114 housed within the device is capable of measuring fluorescence from detection chambers in the injection-molded cartridge. A computing device 115 controls the fluorimeter, motors, and heating elements within the device.

[0882] FIG. 155 shows an assay method utilizing the device that minimizes user input. The method includes off-chip preparation steps that require user input and on-chip automated processes that are controlled by the device. The injection-molded cartridge contains multiple compartments for reagents. Prior to use in an assay, compartments need to be filled with lysis buffer, amplification reagents, and DETECTR reagents including a fluorescence-based reporter, a programmable nuclease, and a guide nucleic acid. The injection-molded cartridge has multiple compartments capable of storing multiple, different sets of amplification and DETECTR reagents (e.g., amplification and DETECTR reagents with different target sequences). Prior to loading, the programmable nuclease and guide nucleic acid need to be incubated at 37° C. for 30 minutes. Once the reagents have been loaded, the injection-molded cartridge can be hermetically sealed, and then loaded into the device. The injection-molded cartridge may be reloadable, or may come pre-loaded with reagents. In such a case, the device can mix and preheat the guide nucleic acid and programmable nuclease prior to performing the DETECTR reaction.

[0883] The injection-molded cartridge contains an inlet port for sample insertion. Once the injection-molded cartridge has been prepared with reagents and sealed, a sample can be collected on a swab and inserted into the inlet port. The inlet port is configured so that a swab can be snapped at a break point within the inlet port to fix the sample within the injection-molded cartridge. Once a sample has been fixed in the injection-molded cartridge, the inlet port can be sealed with a hermetic lid.

[0884] The sealed injection-molded cartridge (loaded with reagents and a sample) can be inserted into the device, which automates sample preparation and analysis. The device first incubates the sample with 200 μl lysis buffer for 2 minutes. The device meters 20 μl aliquots of the sample into 80 or 180 μl LAMP mastermix for isothermal amplification at 60° C. for 10-60 minutes. 10 μl aliquots of the resulting amplicon are metered into 90 or 190 μl solutions containing DETECTR reagents, and incubated at 37° C. concurrent with real-time excitation and detection at 470 nm and 520 nm. The device collects and transfers this data (e.g., as a radio signal) to computing devices for analysis. The device can perform and detect a large number of sequential and parallel amplification and detection reactions targeting different nucleic acid sequences on a single sample.

[0885] FIG. 156 shows optical assemblies for the device. FIG. 156 panel (a) shows an array of diodes 116 that can produce 470 nm light and detect 520 nm or 594 nm light to excite and detect reporter molecules, respectively. FIG. 156 panel (b) shows the diode array with the amber and blue LEDs illuminated. FIG. 156 panel (c) shows an injection molded cartridge illuminated by the diode array.

[0886] FIG. 157 shows a possible design for an injection-molded cartridge. The injection-molded cartridge contains a sample chamber 117 for collecting and then mixing a sample with up to 400 μl of buffer. The sample chamber contains a pump, and is connected through a rotary valve to a series of fluidic channels 118 (e.g., microfluidic channels) which partition the sample into multiple amplification chambers 119. A metering valve within the rotary valve at the exit of the sample chamber dispenses 20 μl aliquots from the sample chamber via into the fluidic channels per rotation. The amplification chambers are coupled to amplification reagent chambers (which contain reagents for the amplification reactions) 120 through resistance channels 118b, which are each configured with a pump and a valve that control the flow of stored reagents into the amplification chambers. The back end of each amplification chamber is connected to a valve that meters flow through a second series of fluidic channels 121 into a series of detection chambers 122. The detection chambers are coupled to detection reagent chambers (which store reagents for the detection reactions) 123 through resistance channels 118b, which are each configured with a pump and a valve that control the flow of stored reagents into the detection chambers. This injection-molded cartridge contains one sample chamber, 5 amplification chambers, and 10 detection chambers.

### Example 66

### Injection-Molded Cartridge Design for Performing Multiple Amplification and DETECTR Reactions on a Single Sample

[0887] This example provides a design for an injection molded cartridge capable of partitioning a sample for separate amplification and DETECTR reactions. The injection-molded cartridge is designed to collect samples from swabs (e.g., buccal swabs). The combinations of distinct amplification and DETECTR reactions allow the sample to be assayed for multiple sequences. For example, the 8 DETECTR reaction could be used to query for 8 separate viruses or 7 viruses and an internal control. The injection-molded cartridge is designed to fit within a device that automates sample and reagent movement, heating, and detection.

[0888] FIG. 158 shows an injection-molded cartridge design with 1 sample chamber 124, 4 amplification chambers 125, and 8 detection chambers 126. Each amplification chamber and detection chamber is connected by a resistance channel 129b to one amplification reagent chamber 127 or one detection reagent chamber 128, respectively. Each series of chambers is connected by fluidic channels 129 as shown in FIG. 158. The fluidic channels connecting the sample chamber to the amplification chambers are between 300 μm and 1 mm in width.

[0889] FIG. 159 shows an alternate design for the injection-molded cartridge in FIG. 158, with an lysis reagent chamber 130 connected to the sample chamber 124. A valve (v1) mediates flow between the lysis reagent chamber and sample chamber. V1-V18 correspond to valves to control flow between chambers.

[0890] FIG. 160 shows a design for the top of an injection-molded cartridge similar to the one depicted in FIG. 159. The injection-molded cartridge can be connected to a manifold for pressure-driven flow. The labeled chambers C1 and C2 correspond to the lysis reagent chamber and sample chamber in FIG. 159. The labeled chambers C3-C6 correspond to the amplification reagent chambers in FIG. 159. The labeled chambers C7-C10 correspond to the amplification chambers in FIG. 159. The labeled chambers C11-C18 correspond to the detection reagent chambers in FIG. 159. The labeled chambers C19-C26 correspond to the detection chambers in FIG. 159. In this design, the sample chamber and the lysis reagent chamber are located near the center of the injection-molded cartridge. The valves controlling flow from C3-C6 and C11-C18 can be controlled 131 from the top of the injection molded cartridge. The detection reagent chambers and detection chambers are also spaced further from the amplification chambers to further isolate detection reagents (e.g., reagents for CRISPR reactions) from the temperatures of the amplification reactions, as in some cases, detection reagents (e.g., CRISPR reaction reagents) aren't stable at the temperatures required for amplification reactions.

[0891] FIG. 161 shows a design for a portion of an injected molded cartridge containing a sample chamber 132 and a lysis reagent chamber 133 that are connected by a rotary valve 134, which is sealed with laser bonded clear polycarbonate. A swab containing a sample can be inserted into the sample chamber. Lysis buffer can be pumped from the lysis reagent chamber to the sample chamber by a partial rotation of a rotary valve 134. The rotary valve contains a metering channel 135a that can transfer a defined volume of liquid from the sample compartment into a channel 135b leading to an amplification chamber 136. Thus, the device is capable of sequentially transfer aliquots from the sample chamber to each of the individual amplification chambers. Flow out of each amplification chamber is controlled by a valve 137, which is connected to a vent. Panel A shows the rotary valve connecting the lysis reagent chamber to the sample chamber. Panel B shows the injection-molded cartridge after the rotary valve has been partially rotated (relative to panel A).

[0892] FIG. 162 shows a design for a portion of an injected molded cartridge containing an amplification reagent chamber 138 and an amplification chamber 139 connected by a slider valve 140. The slider valve has four positions, a first position for delivering fluid into the amplification chambers (shown in panel A) through a first metering channel 141, two positions for metering fluid out of the amplification chamber and into metering channels 142 & 143 (one of these two positions is depicted in panel B), and a fourth position in which the metering channels connect to fluidic channels 144 & 145 leading to separate detection chambers (shown in panel C). A valve 146 in between the amplification reagent chamber and amplification chamber controls flow between the two chambers when the slider valve is in the first of the four positions (shown in panel A).

[0893] FIG. 163 shows a design for an injection-molded cartridge with a plastic shell. The design includes a sample inlet port 147 leading to the sample chamber with a hermetically sealing cap 148. The sample inlet port is designed to accommodate a swab 149. Lysis buffer can be loaded into the top of the sample inlet port prior to insertion of the swab. Insertion of the swab breaks a seal, allowing the lysis buffer to flow through the bottom of the sample inlet port and into the sample chamber. Once inserted, the swab locks in place against a set of plastic projections 150, minimizing sample contamination. Closing the cap over the sample inlet port further protects against contamination. The design is rectangular so that the detection chambers 151 have flat faces for excitation light to pass through during fluorescence detection. The slider valve 152 that meters flow through the amplification chambers can be seen near the back of the injection-molded cartridge. The top of the injection-molded cartridge contains multiple ports 153 terminating in O-rings 154 allow the cartridge to connect to a pneumatic pumping manifold that can apply pressure to individual cartridge chambers. Panel A depicts a design for an injection-molded cartridge. Panel B is a picture of a functional model of an injection-molded cartridge similar to the one shown in panel A. The injection-molded cartridge in panel C differs from the injection molded cartridges in panel A by its sample inlet port, which lacks the breakable seal and projections for holding a swab.

[0894] FIG. 164 panel A shows a bottom view of an injection-molded cartridge design. This design features wide, flat reagent chambers (e.g., amplification reagent chambers) to enable rapid heating and fast fluid mixing by pumping the fluids back and forth into and out of reagent chambers, rather than sequentially flowing different solutions into a single chamber. The short cartridge height allows a heater to wrap around the reaction compartments. The lengths of the channels 155 that connect the same types of chambers to provide equal fluidic resistance when used for mixing. The bottom of the sliding valve 156, amplification reagent chambers 157 and detection chambers 158 can be seen from the bottom of the cartridge. Panel B shows a top view of the injection-molded chip. Top 159 and bottom 160 plastic casing pieces form a hermetic seal around the injection molded chip. Interlocking clips 161 on the plastic casing pieces facilitate easy assembly into a single unit. A series of 0-ring topped ports 162 allow the injection molded cartridge to couple to a pneumatic pumping manifold that can control flow throughout the injection-molded cartridge. A sample inlet port 163 contains a top chamber stoppered by a breakable seal 164.

### Example 67

### Injection-Molded Cartridge Capable of Performing Parallel Amplification and CRISPR Reactions on a Single Sample

[0895] This example describes an injection-molded cartridge designed to perform multiple amplification and CRISPR reactions on a single sample. This cartridge has 4 amplification chambers and 8 detection chambers. A single sample will first be diluted in a sample chamber, and then be partitioned between the four amplification chambers. The amplification products from each amplification chamber will be partitioned to two separate detection chambers. Each amplification chamber is transparent so as to allow optical (e.g., fluorescent) monitoring of the CRISPR (e.g., DETECTR) reactions. Each amplification and detection chamber is connected to a unique reagent storage chamber (e.g., an amplification reagent chamber). Some chambers can be loaded with identical reagents, or each chamber can be loaded with different reagents (e.g., amplification reagents and DETECTR reagents targeting different sequences). Thus, the injection-molded cartridge is capable of performing up to 8 unique sequences of amplification and CRISPR reactions on a single input sample.

[0896] The injection-molded cartridge is configured to insert into a device capable of controlling sample partition, reagent loading, heating and detection within the cartridge. The cartridge contains multiple valves along with a pneumatic delivery manifold, which collectively allow a device to control the flow, pressure, and temperature in the chambers and fluidic channels within the device. The device can also be equipped with an optical detector (e.g., a fluorimeter) capable of measuring the components of the detection chambers.

[0897] FIG. 165 shows designs for a portion of the injection-molded cartridge containing the sample chamber 101 and amplification chambers 102. Panels A & B provide top-down views, while panels C through E show the injection-molded cartridge from the bottom. As shown in panel A, a swab 103 containing the sample to be analyzed can be inserted into a sample inlet port 104. The sample inlet port has a hermetically sealing cap 105, which seals the contents of the injection-molded cartridge from the surrounding environment. Once a sample has been inserted into the sample chamber, a rotating valve 106 can transport lysis buffer from a lysis buffer storage chamber 107 to the sample chamber. Panel A shows the rotating valve connecting the lysis buffer storage and sample chambers. Once sample lysis has completed, the rotating valve can transfer 20 μl aliquots of the sample into a metering channel 108 that can be rotated to deliver sample into microfluidic channels 109 leading to the four amplification reagent chambers 110. Panel B shows the rotating valve positioned to connect the metering channel with the sample chamber.

[0898] As shown from the bottom-up view depicted in panel C, the contents of the amplification reagent chambers can flow into the amplification chambers 101. Mixing is performed by moving the contents back and forth between the two chambers. Once mixing is complete, the samples are completely transferred into the amplification chambers and incubated for a controlled period of time. As is shown in panel D, the inj ection-molded cartridge can be situated over a heating element within the control-device, thus allowing temperature control during the amplification during.

[0899] The direction of flow into and out of the amplification chambers is mediated by a slider valve 111. Panel C depicts the slider valve in a first position that connects each amplification reagent chamber to an amplification chamber. Once the amplification reaction is complete, the panel can slide to second and third positions (one of which is depicted in panel E) that allow sample to move from the amplification chambers into metering channels 112. The slider is then capable of adopting a fourth position in which the metering channels overlap with channels 113 that lead to the detection reagent chambers. Thus, the sample is divided into 8 separate components following amplification.

[0900] FIG. 166 panel A provides a design for the portion of the injection-molded cartridge containing the detection reagent chambers and detection chambers. Following amplification, the sample flows from the amplification chambers and into the detection reagent chambers 114. The sample then flows from the detection reagent chambers and cascades downwards into the detection chambers 115. The injection-molded cartridge connects to a plastic cover piece, which fits over the top of the cartridge and seals its chambers. Panel B shows the injection-molded cartridge with the plastic cover piece 116. As is shown in the side-on view of panel B, the detection chambers have flat, transparent surfaces enabling fluorescence excitation and detection. The detection chambers are situated over a second heater in the control device capable of elevating the temperatures of the detection chambers. Black bosses between the detection chambers minimizes light contamination between chambers, thus improving the accuracy and sensitivity of optical experiments (e.g., luminescence detection, fluorescence, etc.).

[0901] FIG. 167 panels A and B provide full views of the injection molded cartridge. The amplification chambers 102, lysis buffer storage chamber 107, amplification reagent chambers 110, and detection reagent chambers 114 are open, and can be loaded with solutions and reagents. Once desired reagents are loaded into the device, a plastic cover piece can be attached to the injection-molded cartridge, sealing the chambers and fluidic channels within the device. Panel C shows a picture of a working physical model of the injection molded cartridge with the plastic cover piece 116 attached. The plastic cover piece contains an array of O-ring topped inlet ports 118 that can connect to a pneumatic manifold capable of directing flow throughout the chambers and fluidic channels within the injection-molded cartridge. The total dimensions of the cartridge are 92 mm x 80 mm x 52.5 mm including the height of the sample inlet port, and 92 mm×80 mm×19.5 mm excluding the sample inlet port. A retaining ring forms a seal between the injection-molded cartridge and inlet port, which are otherwise distinct and separable.

### Example 68

### Diode Array for Excitation and Detection of Fluorescent Detection from an Injection-Molded Cartridge

[0902] This example covers a detection scheme for fluorescent read-out DETECTR reactions in a multi-chamber cartridge. The cartridge is designed to perform separate DETECTR reactions on separate portions of a sample that have undergone amplification. FIG. 168 shows an injection-molded cartridge 101 housed in a device 102 containing a diode array capable of detecting light from each of the chambers and white light emitting diodes 103 positioned to illuminate the chambers. The injection-molded cartridge has 8 detection chambers 104. The four leftmost (orange) detection chambers contain the dye ATTO 594, and the four rightmost chambers contain the dye ATTO 488. The front faces (pointing out of the device opening) of the detection chambers that contain the 594 dye are coated with an orange gel filter. The front faces of the detection chambers that contain the 488 dye are coated with a yellow filter. White lights illuminate the detection chambers from the side, exciting fluorescent dyes within the detection chambers. The sides of the detection chambers facing the white lights may be coated with optical filters or color-absorbent gels. The device contains diodes that detect light emitted from the detection chambers, thus allowing the device to monitor DETECTR reactions with fluorescent reporters.

[0903] FIG. 169 panels A and B show a graphic user interface for controlling the white lights, detector diodes, and for monitoring data collected on the detector diodes. The graphic user interface allows the user to set temperature shutoff points (e.g., configure a detector diode to shut off if its temperature exceeds 50° C.), the bias voltage or current through the diodes, and the sampling rate (e.g., 100 Hz) on each detector diode. The graphic can display fluorescence readout data from each detector diode.

[0904] FIG. 170 shows the results of a calibration test for the diode array. Each set of 8 datapoints corresponds to the data collected by the 8 detector diodes in a single test. Data set A was collected without an injection molded cartridge in the device. Data sets B-H were collected with an empty injection molded cartridge in the device. Data set B was collected on the empty cartridge. Data sets C and D were collected with the cartridge containing buffer but no dye. Data sets E, F and G were collected with the cartridge containing 1 nM, 10 nM and 100 nM dye, with diodes 1-4 collecting on wells containing ATTO 488 and wells 5-8 containing ATTO 594. Data set H was collected with 100 nM ATTO 488 in wells 1-3, 1 uM ATTO 488 in well 4, 100 nM ATTO 594 in wells 5-7, and 1 μM ATTO 594 in well 8. FIG. 170 shows bar graphs in 8 sections designated as A, B, C, D, E, F, G, and H. Section 1 is LEDS on, no chip, Section B is LEDS on, empty chip, Section C is LEDS on, chip with 100 ul 1× TE, Section D is LEDS on, chip with 90 ul 1× TE, Section E is 90 ul of 1 nM dye, Section F is 90 ul of 10 nM dye, Section G is 90 ul of 100 nM dye, and Section H is 100 nM and 1 uM. Within each section are 7 bars, which from left to right are DIODE 1, DIODE 2, DIODE 3, DIODE 4, DIODE 5, DIODE 6, DIODE 7, and DIODE 8. The y-axis shows fluorescence in arbitrary units (a.u.) ranging from 2.4 to 3.0 in increments of 0.1.

### Example 69

### HERC2 DETECTR Assay Performed Measured with a Diode Array

[0905] This example describes a DETECTR Assay performed on the injection molded cartridge of EXAMPLE 67 using the diode array of EXAMPLE 68. The reagents for the DETECTR assays were loaded directly into the detection chambers. The assays utilized a programmable nuclease with SEQ ID NO: 37, a guide nucleic acid with SEQ ID NO: 256 targeting HERC2 G SNP allele, and a reporter nucleic acid which increased fluorescence response upon cleavage. Four wells contained 5 μM reporter, 150 nM programmable nuclease, 600 nM guide nucleic acid, and 500 pM target nucleic acid. Two wells contained 5 μM reporter, 150 nM programmable nucleic acid, 600 nM guide nucleic, and no target. Two wells contained only buffer. The reporters contained either ATTO 488 or ATTO 594.

[0906] FIG. 171 shows fluorescence traces from the 8 detection chambers measured by an 8 diode detector array. The detection chambers containing a reporter, programmable nuclease, guide nucleic acid, and target nucleic acid provided fluorescence responses that increased linearly with time. The detection chambers containing DETECTR reagents but lacking the target nucleic acid and the detection chambers containing only buffer did not display increases in fluorescence. Thus, the detection chambers with active transcollateral reporter cleavage were distinguishable by fluorescence. FIG. 171 shows line graphs with the x-axis showing the DETECTR timepoint in minutes ranging from 0 to 35 in increments of 5 and the y-axis showing the net fluorescence in arbitrary units (au.) ranging from −0.02 to 0.12 in increments of 0.02. The four lines linearly increasing are from left/highest to right/lowest are G-SNP—488 nm, G-SNP—594 nm, G-SNP—488 nm, and G-SNP—488 nm. The last two in the prior list are nearly overlapping. The higher flat line near the bottom corresponds to DETECTR MM—488 nm. The lower flat lines at the bottom correspond to DETECTR MM—594 nm and 1× TE—594 nm.

[0907] FIG. 172 shows an image of the detection chambers 30 minutes after DETECTR reagent addition. Detection chambers 1, 4, 5, and 8 contained the target nucleic acid, and are visibly brighter than the remaining detection chambers.

### Example 70

### Amplification of a Target Nucleic Acid in a Viral Lysis Buffer

[0908] This example describes amplification of a target nucleic acid in a viral lysis buffer. The effects of various buffer compositions, reducing agents, and incubation temperatures were tested on amplification of a target nucleic acid. Samples in different buffers were amplified using LAMP amplification, and the resulting fluorescence was measured. Higher fluorescence was indicative of more amplification.

[0909] FIG. 173 shows the results of amplification of a SeraCare target nucleic acid using LAMP under different lysis conditions. Samples were amplified in various buffers. Samples were incubated for 5 minutes at either room temperature (left plots) or 95° C. (right plots). Samples containing either no target (“NTC”), 2.5, 25, or 250 copies per reaction. Assays were performed in triplicate using 5 μL of sample in a 25 μL reaction.

[0910] FIG. 174 shows the results of amplification of a SeraCare standard target nucleic acid using LAMP under different lysis conditions. Samples were amplified in various buffers. Samples containing either no target (“NTC”), 1.5, 2.5, 15, 25, 150, or 250 copies per reaction. Assays were performed in triplicate using 3 μL of sample in a 15 μL reaction or 5 μL of sample in a 25 μL reaction.

[0911] The results of this experiment demonstrated certain buffers were more conducive to LAMP amplification.

### Example 71

### Amplification of a Target Nucleic Acid from COVID-19 Patient Samples in a Viral Lysis Buffer

[0912] This example describes amplification of a target nucleic acid from COVID-19 patient samples in a viral lysis buffer. Samples collected from patients positive for COVID-19 were lysed and amplified in viral lysis buffers with varying components. Target nucleic acids corresponding to the SARS-CoV-2 N gene and RNaseP were amplified using LAMP as described in EXAMPLE 22. Various viral lysis buffer formulations were tested.

[0913] FIG. 175 shows amplification of a SARS-CoV-2 N gene (“N”) and an RNase P sample input control nucleic acid (“RP”) in the presence of six different viral lysis buffers (“VLB,” “VLB-D,” “VLB-T,” “Buffer,” “Buffer-A,” and “Buffer-B”). Buffer-A contains Buffer with Reducing Agent A and Buffer-B contains Buffer with Reducing Agent B. Shaded squares indicate rate of amplification, with darker shading indicating faster amplification. Amplification was performed at either 95° C. (“95 C”) or room temperature (“RT”) on high, medium, or low titer COVID-19 positive patient samples (“16.9,” “30.5,” and “33.6,” respectively). Samples were measured in duplicate.

[0914] While preferred embodiments of the present disclosure have been shown and described herein, it will be obvious to those skilled in the art that such embodiments are provided by way of example only. Numerous variations, changes, and substitutions will now occur to those skilled in the art without departing from the disclosure. It should be understood that various alternatives to the embodiments of the disclosure described herein may be employed in practicing the disclosure. It is intended that the following claims define the scope of the disclosure and that methods and structures within the scope of these claims and their equivalents be covered thereby.

The application's sequence listing, which the Patent Office published only in electronic form, follows.

SEQUENCE LISTING (416 sequences)

SEQ ID NO: 1 - RNA, 5 nt, Artificial Sequence
  source: /note="Description of Artificial Sequence: Synthetic oligonucleotide"
uuuuu

SEQ ID NO: 2 - RNA, 8 nt, Artificial Sequence
  source: /note="Description of Artificial Sequence: Synthetic oligonucleotide"
uuuuuuuu

SEQ ID NO: 3 - RNA, 10 nt, Artificial Sequence
  source: /note="Description of Artificial Sequence: Synthetic oligonucleotide"
uuuuuuuuuu

SEQ ID NO: 4 - DNA, 10 bp, Artificial Sequence
  source: /note="Description of Artificial Sequence: Synthetic oligonucleotide"
  source: /note="Description of Combined DNA/RNA Molecule: Synthetic oligonucleotide"
ttttuutttt

SEQ ID NO: 5 - DNA, 6 bp, Artificial Sequence
  source: /note="Description of Artificial Sequence: Synthetic oligonucleotide"
  source: /note="Description of Combined DNA/RNA Molecule: Synthetic oligonucleotide"
ttuutt

SEQ ID NO: 6 - DNA, 6 bp, Artificial Sequence
  source: /note="Description of Artificial Sequence: Synthetic oligonucleotide"
  source: /note="Description of Combined DNA/RNA Molecule: Synthetic oligonucleotide"
taaugc

SEQ ID NO: 7 - DNA, 6 bp, Artificial Sequence
  source: /note="Description of Artificial Sequence: Synthetic oligonucleotide"
  source: /note="Description of Combined DNA/RNA Molecule: Synthetic oligonucleotide"
tauggc

SEQ ID NO: 8 - RNA, 5 nt, Artificial Sequence
  source: /note="Description of Artificial Sequence: Synthetic oligonucleotide"
uuuuu

SEQ ID NO: 9 - DNA, 8 bp, Artificial Sequence
  source: /note="Description of Artificial Sequence: Synthetic oligonucleotide"
ttattatt

SEQ ID NO: 10 - DNA, 6 bp, Artificial Sequence
  source: /note="Description of Artificial Sequence: Synthetic oligonucleotide"
tttttt

SEQ ID NO: 11 - DNA, 8 bp, Artificial Sequence
  source: /note="Description of Artificial Sequence: Synthetic oligonucleotide"
tttttttt

SEQ ID NO: 12 - DNA, 10 bp, Artificial Sequence
  source: /note="Description of Artificial Sequence: Synthetic oligonucleotide"
tttttttttt

SEQ ID NO: 13 - DNA, 12 bp, Artificial Sequence
  source: /note="Description of Artificial Sequence: Synthetic oligonucleotide"
tttttttttttt

SEQ ID NO: 14 - DNA, 14 bp, Artificial Sequence
  source: /note="Description of Artificial Sequence: Synthetic oligonucleotide"
tttttttttttttt

SEQ ID NO: 15 - DNA, 6 bp, Artificial Sequence
  source: /note="Description of Artificial Sequence: Synthetic oligonucleotide"
aaaaaa

SEQ ID NO: 16 - DNA, 6 bp, Artificial Sequence
  source: /note="Description of Artificial Sequence: Synthetic oligonucleotide"
cccccc

SEQ ID NO: 17 - DNA, 6 bp, Artificial Sequence
  source: /note="Description of Artificial Sequence: Synthetic oligonucleotide"
gggggg

SEQ ID NO: 18 - RNA, 50 nt, Artificial Sequence
  source: /note="Description of Artificial Sequence: Synthetic oligonucleotide"
gccaccccaaaaaugaaggggacuaaaacauccuacaaaaaaaugcuaaa

SEQ ID NO: 19 - RNA, 50 nt, Artificial Sequence
  source: /note="Description of Artificial Sequence: Synthetic oligonucleotide"
gccaccccaaaaaugaaggggacuaaaacaccuacaaaaaaaugcuaaaa

SEQ ID NO: 20 - RNA, 50 nt, Artificial Sequence
  source: /note="Description of Artificial Sequence: Synthetic oligonucleotide"
gccaccccaaaaaugaaggggacuaaaacacuacaaaaaaaugcuaaaag

SEQ ID NO: 21 - RNA, 50 nt, Artificial Sequence
  source: /note="Description of Artificial Sequence: Synthetic oligonucleotide"
gccaccccaaaaaugaaggggacuaaaacaagaaacauuugauaacaaug

SEQ ID NO: 22 - RNA, 50 nt, Artificial Sequence
  source: /note="Description of Artificial Sequence: Synthetic oligonucleotide"
gccaccccaaaaaugaaggggacuaaaacagaaacauuugauaacaauga

SEQ ID NO: 23 - RNA, 50 nt, Artificial Sequence
  source: /note="Description of Artificial Sequence: Synthetic oligonucleotide"
gccaccccaaaaaugaaggggacuaaaacaaacauuugauaacaaugaag

SEQ ID NO: 24 - RNA, 50 nt, Artificial Sequence
  source: /note="Description of Artificial Sequence: Synthetic oligonucleotide"
gccaccccaaaaaugaaggggacuaaaacaacauuugauaacaaugaaga

SEQ ID NO: 25 - RNA, 50 nt, Artificial Sequence
  source: /note="Description of Artificial Sequence: Synthetic oligonucleotide"
gccaccccaaaaaugaaggggacuaaaacaugccuauaacaaaugaucag

SEQ ID NO: 26 - RNA, 50 nt, Artificial Sequence
  source: /note="Description of Artificial Sequence: Synthetic oligonucleotide"
gccaccccaaaaaugaaggggacuaaaacagccuauaacaaaugaucaga

SEQ ID NO: 27 - protein, 1228 aa, Lachnospiraceae bacterium
MSKLEKFTNCYSLSKTLRFKAIPVGKTQENIDNKRLLVEDEKRAEDYKGVKKLLDRYYLSFINDVLHSIKLKNLNNYISLFRKKTRTEKENKELENLEINLRKEIAKAFKGNEGYKSLFKKDIIETILPEFLDDKDEIALVNSFNGFTTAFTGFFDNRENMFSEEAKSTSIAFRCINENLTRYISNMDIFEKVDAIFDKHEVQEIKEKILNSDYDVEDFFEGEFFNFVLTQEGIDVYNAIIGGFVTESGEKIKGLNEYINLYNQKTKQKLPKFKPLYKQVLSDRESLSFYGEGYTSDEEVLEVFRNTLNKNSEIFSSIKKLEKLFKNFDEYSSAGIFVKNGPAISTISKDIFGEWNVIRDKWNAEYDDIHLKKKAVVTEKYEDDRRKSFKKIGSFSLEQLQEYADADLSVVEKLKEIIIQKVDEIYKVYGSSEKLFDADFVLEKSLKKNDAVVAIMKDLLDSVKSFENYIKAFFGEGKETNRDESFYGDFVLAYDILLKVDHIYDAIRNYVTQKPYSKDKFKLYFQNPQFMGGWDKDKETDYRATILRYGSKYYLAIMDKKYAKCLQKIDKDDVNGNYEKINYKLLPGPNKMLPKVFFSKKWMAYYNPSEDIQKIYKNGTFKKGDMFNLNDCHKLIDFFKDSISRYPKWSNAYDFNFSETEKYKDIAGFYREVEEQGYKVSFESASKKEVDKLVEEGKLYMFQIYNKDFSDKSHGTPNLHTMYFKLLFDENNHGQIRLSGGAELFMRRASLKKEELVVHPANSPIANKNPDNPKKTTTLSYDVYKDKRFSEDQYELHIPIAINKCPKNIFKINTEVRVLLKHDDNPYVIGIDRGERNLLYIVVVDGKGNIVEQYSLNEIINNFNGIRIKTDYHSLLDKKEKERFEARQNWTSIENIKELKAGYISQVVHKICELVEKYDAVIALEDLNSGFKNSRVKVEKQVYQKFEKMLIDKLNYMVDKKSNPCATGGALKGYQITNKFESFKSMSTQNGFIFYIPAWLTSKIDPSTGFVNLLKTKYTSIADSKKFISSFDRIMYVPEEDLFEFALDYKNFSRTDADYIKKWKLYSYGNRIRIFRNPKKNNVFDWEEVCLTSAYKELFNKYGINYQQGDIRALLCEQSDKAFYSSFMALMSLMLQMRNSITGRTDVDFLISPVKNSDGIFYDSRNYEAQENAILPKNADANGAYNIARKVLWAIGQFKKAEDEKLDKVKIAISNKEWLEYAQTSVKH

SEQ ID NO: 28 - protein, 1307 aa, Acidaminococcus sp.
MTQFEGFTNLYQVSKTLRFELIPQGKTLKHIQEQGFIEEDKARNDHYKELKPIIDRIYKTYADQCLQLVQLDWENLSAAIDSYRKEKTEETRNALIEEQATYRNAIHDYFIGRTDNLTDAINKRHAEIYKGLFKAELFNGKVLKQLGTVTTTEHENALLRSFDKFTTYFSGFYENRKNVFSAEDISTAIPHRIVQDNFPKFKENCHIFTRLITAVPSLREHFENVKKAIGIFVSTSIEEVFSFPFYNQLLTQTQIDLYNQLLGGISREAGTEKIKGLNEVLNLAIQKNDETAHIIASLPHRFIPLFKQILSDRNTLSFILEEFKSDEEVIQSFCKYKTLLRNENVLETAEALFNELNSIDLTHIFISHKKLETISSALCDHWDTLRNALYERRISELTGKITKSAKEKVQRSLKHEDINLQEIISAAGKELSEAFKQKTSEILSHAHAALDQPLPTTLKKQEEKEILKSQLDSLLGLYHLLDWFAVDESNEVDPEFSARLTGIKLEMEPSLSFYNKARNYATKKPYSVEKFKLNFQMPTLASGWDVNKEKNNGAILFVKNGLYYLGIMPKQKGRYKALSFEPTEKTSEGFDKMYYDYFPDAAKMIPKCSTQLKAVTAHFQTHTTPILLSNNFIEPLEITKEIYDLNNPEKEPKKFQTAYAKKTGDQKGYREALCKWIDFTRDFLSKYTKTTSIDLSSLRPSSQYKDLGEYYAELNPLLYHISFQRIAEKEIMDAVETGKLYLFQIYNKDFAKGHHGKPNLHTLYWTGLFSPENLAKTSIKLNGQAELFYRPKSRMKRMAHRLGEKMLNKKLKDQKTPIPDTLYQELYDYVNHRLSHDLSDEARALLPNVITKEVSHEIIKDRRFTSDKFFFHVPITLNYQAANSPSKFNQRVNAYLKEHPETPIIGIDRGERNLIYITVIDSTGKILEQRSLNTIQQFDYQKKLDNREKERVAARQAWSVVGTIKDLKQGYLSQVIHEIVDLMIHYQAVVVLENLNFGFKSKRTGIAEKAVYQQFEKMLIDKLNCLVLKDYPAEKVGGVLNPYQLTDQFTSFAKMGTQSGFLFYVPAPYTSKIDPLTGFVDPFVWKTIKNHESRKHFLEGFDFLHYDVKTGDFILHFKMNRNLSFQRGLPGFMPAWDIVFEKNETQFDAKGTPFIAGKRIVPVIENHRFTGRYRDLYPANELIALLEEKGIVFRDGSNILPKLLENDDSHAIDTMVALIRSVLQMRNSNAATGEDYINSPVRDLNGVCFDSRFQNPEWPMDADANGAYHIALKGQLLLNHLKESKDLKLQNGISNQDWLAYIQELRN

SEQ ID NO: 29 - protein, 1300 aa, Francisella novicida
MSIYQEFVNKYSLSKTLRFELIPQGKTLENIKARGLILDDEKRAKDYKKAKQIIDKYHQFFIEEILSSVCISEDLLQNYSDVYFKLKKSDDDNLQKDFKSAKDTIKKQISEYIKDSEKFKNLFNQNLIDAKKGQESDLILWLKQSKDNGIELFKANSDITDIDEALEIIKSFKGWTTYFKGFHENRKNVYSSNDIPTSIIYRIVDDNLPKFLENKAKYESLKDKAPEAINYEQIKKDLAEELTFDIDYKTSEVNQRVFSLDEVFEIANFNNYLNQSGITKFNTIIGGKFVNGENTKRKGINEYINLYSQQINDKTLKKYKMSVLFKQILSDTESKSFVIDKLEDDSDVVTTMQSFYEQIAAFKTVEEKSIKETLSLLFDDLKAQKLDLSKIYFKNDKSLTDLSQQVFDDYSVIGTAVLEYITQQIAPKNLDNPSKKEQELIAKKTEKAKYLSLETIKLALEEFNKHRDIDKQCRFEEILANFAAIPMIFDEIAQNKDNLAQISIKYQNQGKKDLLQASAEDDVKAIKDLLDQTNNLLHKLKIFHISQSEDKANILDKDEHFYLVFEECYFELANIVPLYNKIRNYITQKPYSDEKFKLNFENSTLANGWDKNKEPDNTAILFIKDDKYYLGVMNKKNNKIFDDKAIKENKGEGYKKIVYKLLPGANKMLPKVFFSAKSIKFYNPSEDILRIRNHSTHTKNGSPQKGYEKFEFNIEDCRKFIDFYKQSISKHPEWKDFGFRFSDTQRYNSIDEFYREVENQGYKLTFENISESYIDSVVNQGKLYLFQIYNKDFSAYSKGRPNLHTLYWKALFDERNLQDVVYKLNGEAELFYRKQSIPKKITHPAKEAIANKNKDNPKKESVFEYDLIKDKRFTEDKFFFHCPITINFKSSGANKFNDEINLLLKEKANDVHILSIDRGERHLAYYTLVDGKGNIIKQDTFNIIGNDRMKTNYHDKLAAIEKDRDSARKDWKKINNIKEMKEGYLSQVVHEIAKLVIEYNAIVVFEDLNFGFKRGRFKVEKQVYQKLEKMLIEKLNYLVFKDNEFDKTGGVLRAYQLTAPFETFKKMGKQTGIIYYVPAGFTSKICPVTGFVNQLYPKYESVSKSQEFFSKFDKICYNLDKGYFEFSFDYKNFGDKAAKGKWTIASFGSRLINFRNSDKNHNWDTREVYPTKELEKLLKDYSIEYGHGECIKAAICGESDKKFFAKLTSVLNTILQMRNSKTGTELDYLISPVADVNGNFFDSRQAPKNMPQDADANGAYHIGLKGLMLLGRIKNNQEGKKLNLVIKNEEYFEFVQNRNN

SEQ ID NO: 30 - protein, 1246 aa, Porphyromonas macacae
MKTQHFFEDFTSLYSLSKTIRFELKPIGKTLENIKKNGLIRRDEQRLDDYEKLKKVIDEYHEDFIANILSSFSFSEEILQSYIQNLSESEARAKIEKTMRDTLAKAFSEDERYKSIFKKELVKKDIPVWCPAYKSLCKKFDNFTTSLVPFHENRKNLYTSNEITASIPYRIVHVNLPKFIQNIEALCELQKKMGADLYLEMMENLRNVWPSFVKTPDDLCNLKTYNHLMVQSSISEYNRFVGGYSTEDGTKHQGINEWINIYRQRNKEMRLPGLVFLHKQILAKVDSSSFISDTLENDDQVFCVLRQFRKLFWNTVSSKEDDAASLKDLFCGLSGYDPEAIYVSDAHLATISKNIFDRWNYISDAIRRKTEVLMPRKKESVERYAEKISKQIKKRQSYSLAELDDLLAHYSEESLPAGFSLLSYFTSLGGQKYLVSDGEVILYEEGSNIWDEVLIAFRDLQVILDKDFTEKKLGKDEEAVSVIKKALDSALRLRKFFDLLSGTGAEIRRDSSFYALYTDRMDKLKGLLKMYDKVRNYLTKKPYSIEKFKLHFDNPSLLSGWDKNKELNNLSVIFRQNGYYYLGIMTPKGKNLFKTLPKLGAEEMFYEKMEYKQIAEPMLMLPKVFFPKKTKPAFAPDQSVVDIYNKKTFKTGQKGFNKKDLYRLIDFYKEALTVHEWKLFNFSFSPTEQYRNIGEFFDEVREQAYKVSMVNVPASYIDEAVENGKLYLFQIYNKDFSPYSKGIPNLHTLYWKALFSEQNQSRVYKLCGGGELFYRKASLHMQDTTVHPKGISIHKKNLNKKGETSLFNYDLVKDKRFTEDKFFFHVPISINYKNKKITNVNQMVRDYIAQNDDLQIIGIDRGERNLLYISRIDTRGNLLEQFSLNVIESDKGDLRTDYQKILGDREQERLRRRQEWKSIESIKDLKDGYMSQVVHKICNMVVEHKAIVVLENLNLSFMKGRKKVEKSVYEKFERMLVDKLNYLVVDKKNLSNEPGGLYAAYQLTNPLFSFEELHRYPQSGILFFVDPWNTSLTDPSTGFVNLLGRINYTNVGDARKFFDRFNAIRYDGKGNILFDLDLSRFDVRVETQRKLWTLTTFGSRIAKSKKSGKWMVERIENLSLCFLELFEQFNIGYRVEKDLKKAILSQDRKEFYVRLIYLFNLMMQIRNSDGEEDYILSPALNEKNLQFDSRLIEAKDLPVDADANGAYNVARKGLMVVQRIKRGDHESIHRIGRAQWLRYVQEGIVE

SEQ ID NO: 31 - protein, 1373 aa, Moraxella bovoculi
MLFQDFTHLYPLSKTVRFELKPIDRTLEHIHAKNFLSQDETMADMHQKVKVILDDYHRDFIADMMGEVKLTKLAEFYDVYLKFRKNPKDDELQKQLKDLQAVLRKEIVKPIGNGGKYKAGYDRLFGAKLFKDGKELGDLAKFVIAQEGESSPKLAHLAHFEKFSTYFTGFHDNRKNMYSDEDKHTAIAYRLIHENLPRFIDNLQILTTIKQKHSALYDQIINELTASGLDVSLASHLDGYHKLLTQEGITAYNTLLGGISGEAGSPKIQGINELINSHHNQHCHKSERIAKLRPLHKQILSDGMSVSFLPSKFADDSEMCQAVNEFYRHYADVFAKVQSLFDGFDDHQKDGIYVEHKNLNELSKQAFGDFALLGRVLDGYYVDVVNPEFNERFAKAKTDNAKAKLTKEKDKFIKGVHSLASLEQAIEHYTARHDDESVQAGKLGQYFKHGLAGVDNPIQKIHNNHSTIKGFLERERPAGERALPKIKSGKNPEMTQLRQLKELLDNALNVAHFAKLLTTKTTLDNQDGNFYGEFGVLYDELAKIPTLYNKVRDYLSQKPFSTEKYKLNFGNPTLLNGWDLNKEKDNFGVILQKDGCYYLALLDKAHKKVFDNAPNTGKSIYQKMIYKYLEVRKQFPKVFFSKEAIAINYHPSKELVEIKDKGRQRSDDERLKLYRFILECLKIHPKYDKKFEGAIGDIQLFKKDKKGREVPISEKDLFDKINGIFSSKPKLEMEDFFIGEFKRYNPSQDLVDQYNIYKKIDSNDNRKKENFYNNHPKFKKDLVRYYYESMCKHEEWEESFEFSKKLQDIGCYVDVNELFTEIETRRLNYKISFCNINADYIDELVEQGQLYLFQIYNKDFSPKAHGKPNLHTLYFKALFSEDNLADPIYKLNGEAQIFYRKASLDMNETTIHRAGEVLENKNPDNPKKRQFVYDIIKDKRYTQDKFMLHVPITMNFGVQGMTIKEFNKKVNQSIQQYDEVNVIGIDRGERHLLYLTVINSKGEILEQCSLNDITTASANGTQMTTPYHKILDKREIERLNARVGWGEIETIKELKSGYLSHVVHQISQLMLKYNAIVVLEDLNFGFKRGRFKVEKQIYQNFENALIKKLNHLVLKDKADDEIGSYKNALQLTNNFTDLKSIGKQTGFLFYVPAWNTSKIDPETGFVDLLKPRYENIAQSQAFFGKFDKICYNADKDYFEFHIDYAKFTDKAKNSRQIWTICSHGDKRYVYDKTANQNKGAAKGINVNDELKSLFARHHINEKQPNLVMDICQNNDKEFHKSLMYLLKTLLALRYSNASSDEDFILSPVANDEGVFFNSALADDTQPQNADANGAYHIALKGLWLLNELKNSDDLNKVKLAIDNQTWLNFAQNR

SEQ ID NO: 32 - protein, 1259 aa, Moraxella bovoculi
MGIHGVPAALFQDFTHLYPLSKTVRFELKPIGRTLEHIHAKNFLSQDETMADMYQKVKVILDDYHRDFIADMMGEVKLTKLAEFYDVYLKFRKNPKDDGLQKQLKDLQAVLRKESVKPIGSGGKYKTGYDRLFGAKLFKDGKELGDLAKFVIAQEGESSPKLAHLAHFEKFSTYFTGFHDNRKNMYSDEDKHTAIAYRLIHENLPRFIDNLQILTTIKQKHSALYDQIINELTASGLDVSLASHLDGYHKLLTQEGITAYNRIIGEVNGYTNKHNQICHKSERIAKLRPLHKQILSDGMGVSFLPSKFADDSEMCQAVNEFYRHYTDVFAKVQSLFDGFDDHQKDGIYVEHKNLNELSKQAFGDFALLGRVLDGYYVDVVNPEFNERFAKAKTDNAKAKLTKEKDKFIKGVHSLASLEQAIEHHTARHDDESVQAGKLGQYFKHGLAGVDNPIQKIHNNHSTIKGFLERERPAGERALPKIKSGKNPEMTQLRQLKELLDNALNVAHFAKLLTTKTTLDNQDGNFYGEFGVLYDELAKIPTLYNKVRDYLSQKPFSTEKYKLNFGNPTLLNGWDLNKEKDNFGVILQKDGCYYLALLDKAHKKVFDNAPNTGKNVYQKMVYKLLPGPNKMLPKVFFAKSNLDYYNPSAELLDKYAKGTHKKGDNFNLKDCHALIDFFKAGINKHPEWQHFGFKFSPTSSYRDLSDFYREVEPQGYQVKFVDINADYIDELVEQGKLYLFQIYNKDFSPKAHGKPNLHTLYFKALFSEDNLADPIYKLNGEAQIFYRKASLDMNETTIHRAGEVLENKNPDNPKKRQFVYDIIKDKRYTQDKFMLHVPITMNFGVQGMTIKEFNKKVNQSIQQYDEVNVIGIDRGERHLLYLTVINSKGEILEQRSLNDITTASANGTQVTTPYHKILDKREIERLNARVGWGEIETIKELKSGYLSHVVHQINQLMLKYNAIVVLEDLNFGFKRGRFKVEKQIYQNFENALIKKLNHLVLKDKADDEIGSYKNALQLTNNFTDLKSIGKQTGFLFYVPAWNTSKIDPETGFVDLLKPRYENIAQSQAFFGKFDKICYNTDKGYFEFHIDYAKFTDKAKNSRQKWAICSHGDKRYVYDKTANQNKGAAKGINVNDELKSLFARYHINDKQPNLVMDICQNNDKEFHKSLMCLLKTLLALRYSNASSDEDFILSPVANDEGVFFNSALADDTQPQNADANGAYHIALKGLWLLNELKNSDDLNKVKLAIDNQTWLNFAQNR

SEQ ID NO: 33 - protein, 1269 aa, Moraxella bovoculi
MGIHGVPAALFQDFTHLYPLSKTVRFELKPIGKTLEHIHAKNFLNQDETMADMYQKVKAILDDYHRDFIADMMGEVKLTKLAEFYDVYLKFRKNPKDDGLQKQLKDLQAVLRKEIVKPIGNGGKYKAGYDRLFGAKLFKDGKELGDLAKFVIAQEGESSPKLAHLAHFEKFSTYFTGFHDNRKNMYSDEDKHTAIAYRLIHENLPRFIDNLQILATIKQKHSALYDQIINELTASGLDVSLASHLDGYHKLLTQEGITAYNTLLGGISGEAGSRKIQGINELINSHHNQHCHKSERIAKLRPLHKQILSDGMGVSFLPSKFADDSEVCQAVNEFYRHYADVFAKVQSLFDGFDDYQKDGIYVEYKNLNELSKQAFGDFALLGRVLDGYYVDVVNPEFNERFAKAKTDNAKAKLTKEKDKFIKGVHSLASLEQAIEHYTARHDDESVQAGKLGQYFKHGLAGVDNPIQKIHNNHSTIKGFLERERPAGERALPKIKSDKSPEIRQLKELLDNALNVAHFAKLLTTKTTLHNQDGNFYGEFGALYDELAKIATLYNKVRDYLSQKPFSTEKYKLNFGNPTLLNGWDLNKEKDNFGVILQKDGCYYLALLDKAHKKVFDNAPNTGKSVYQKMIYKLLPGPNKMLPKVFFAKSNLDYYNPSAELLDKYAQGTHKKGDNFNLKDCHALIDFFKAGINKHPEWQHFGFKFSPTSSYQDLSDFYREVEPQGYQVKFVDINADYINELVEQGQLYLFQIYNKDFSPKAHGKPNLHTLYFKALFSEDNLVNPIYKLNGEAEIFYRKASLDMNETTIHRAGEVLENKNPDNPKKRQFVYDIIKDKRYTQDKFMLHVPITMNFGVQGMTIKEFNKKVNQSIQQYDEVNVIGIDRGERHLLYLTVINSKGEILEQRSLNDITTASANGTQMTTPYHKILDKREIERLNARVGWGEIETIKELKSGYLSHVVHQISQLMLKYNAIVVLEDLNFGFKRGRFKVEKQIYQNFENALIKKLNHLVLKDKADDEIGSYKNALQLTNNFTDLKSIGKQTGFLFYVPAWNTSKIDPETGFVDLLKPRYENIAQSQAFFGKFDKICYNADRGYFEFHIDYAKFNDKAKNSRQIWKICSHGDKRYVYDKTANQNKGATIGVNVNDELKSLFTRYHINDKQPNLVMDICQNNDKEFHKSLMYLLKTLLALRYSNASSDEDFILSPVANDEGVFFNSALADDTQPQNADANGAYHIALKGLWLLNELKNSDDLNKVKLAIDNQTWLNFAQNR

SEQ ID NO: 34 - protein, 1306 aa, Thiomicrospira sp.
MGIHGVPAATKTFDSEFFNLYSLQKTVRFELKPVGETASFVEDFKNEGLKRVVSEDERRAVDYQKVKEIIDDYHRDFIEESLNYFPEQVSKDALEQAFHLYQKLKAAKVEEREKALKEWEALQKKLREKVVKCFSDSNKARFSRIDKKELIKEDLINWLVAQNREDDIPTVETFNNFTTYFTGFHENRKNIYSKDDHATAISFRLIHENLPKFFDNVISFNKLKEGFPELKFDKVKEDLEVDYDLKHAFEIEYFVNFVTQAGIDQYNYLLGGKTLEDGTKKQGMNEQINLFKQQQTRDKARQIPKLIPLFKQILSERTESQSFIPKQFESDQELFDSLQKLHNNCQDKFTVLQQAILGLAEADLKKVFIKTSDLNALSNTIFGNYSVFSDALNLYKESLKTKKAQEAFEKLPAHSIHDLIQYLEQFNSSLDAEKQQSTDTVLNYFIKTDELYSRFIKSTSEAFTQVQPLFELEALSSKRRPPESEDEGAKGQEGFEQIKRIKAYLDTLMEAVHFAKPLYLVKGRKMIEGLDKDQSFYEAFEMAYQELESLIIPIYNKARSYLSRKPFKADKFKINFDNNTLLSGWDANKETANASILFKKDGLYYLGIMPKGKTFLFDYFVSSEDSEKLKQRRQKTAEEALAQDGESYFEKIRYKLLPGASKMLPKVFFSNKNIGFYNPSDDILRIRNTASHTKNGTPQKGHSKVEFNLNDCHKMIDFFKSSIQKHPEWGSFGFTFSDTSDFEDMSAFYREVENQGYVISFDKIKETYIQSQVEQGNLYLFQIYNKDFSPYSKGKPNLHTLYWKALFEEANLNNVVAKLNGEAEIFFRRHSIKASDKVVHPANQAIDNKNPHTEKTQSTFEYDLVKDKRYTQDKFFFHVPISLNFKAQGVSKFNDKVNGFLKGNPDVNIIGIDRGERHLLYFTVVNQKGEILVQESLNTLMSDKGHVNDYQQKLDKKEQERDAARKSWTTVENIKELKEGYLSHVVHKLAHLIIKYNAIVCLEDLNFGFKRGRFKVEKQVYQKFEKALIDKLNYLVFKEKELGEVGHYLTAYQLTAPFESFKKLGKQSGILFYVPADYTSKIDPTTGFVNFLDLRYQSVEKAKQLLSDFNAIRFNSVQNYFEFEIDYKKLTPKRKVGTQSKWVICTYGDVRYQNRRNQKGHWETEEVNVTEKLKALFASDSKTTTVIDYANDDNLIDVILEQDKASFFKELLWLLKLTMTLRHSKIKSEDDFILSPVKNEQGEFYDSRKAGEVWPKDADANGAYHIALKGLWNLQQINQWEKGKTLNLAIKNQDWFSFIQEKPYQE

SEQ ID NO: 35 - protein, 1214 aa, Butyrivibrio sp.
MGIHGVPAAYYQNLTKKYPVSKTIRNELIPIGKTLENIRKNNILESDVKRKQDYEHVKGIMDEYHKQLINEALDNYMLPSLNQAAEIYLKKHVDVEDREEFKKTQDLLRREVTGRLKEHENYTKIGKKDILDLLEKLPSISEEDYNALESFRNFYTYFTSYNKVRENLYSDEEKSSTVAYRLINENLPKFLDNIKSYAFVKAAGVLADCIEEEEQDALFMVETFNMTLTQEGIDMYNYQIGKVNSAINLYNQKNHKVEEFKKIPKMKVLYKQILSDREEVFIGEFKDDETLLSSIGAYGNVLMTYLKSEKINIFFDALRESEGKNVYVKNDLSKTTMSNIVFGSWSAFDELLNQEYDLANENKKKDDKYFEKRQKELKKNKSYTLEQMSNLSKEDISPIENYIERISEDIEKICIYNGEFEKIVVNEHDSSRKLSKNIKAVKVIKDYLDSIKELEHDIKLINGSGQELEKNLVVYVGQEEALEQLRPVDSLYNLTRNYLTKKPFSTEKVKLNFNKSTLLNGWDKNKETDNLGILFFKDGKYYLGIMNTTANKAFVNPPAAKTENVFKKVDYKLLPGSNKMLPKVFFAKSNIGYYNPSTELYSNYKKGTHKKGPSFSIDDCHNLIDFFKESIKKHEDWSKFGFEFSDTADYRDISEFYREVEKQGYKLTFTDIDESYINDLIEKNELYLFQIYNKDFSEYSKGKLNLHTLYFMMLFDQRNLDNVVYKLNGEAEVFYRPASIAENELVIHKAGEGIKNKNPNRAKVKETSTFSYDIVKDKRYSKYKFTLHIPITMNFGVDEVRRFNDVINNALRTDDNVNVIGIDRGERNLLYVVVINSEGKILEQISLNSIINKEYDIETNYHALLDEREDDRNKARKDWNTIENIKELKTGYLSQVVNVVAKLVLKYNAIICLEDLNFGFKRGRQKVEKQVYQKFEKMLIEKLNYLVIDKSREQVSPEKMGGALNALQLTSKFKSFAELGKQSGIIYYVPAYLTSKIDPTTGFVNLFYIKYENIEKAKQFFDGFDFIRFNKKDDMFEFSFDYKSFTQKACGIRSKWIVYTNGERIIKYPNPEKNNLFDEKVINVTDEIKGLFKQYRIPYENGEDIKEIIISKAEADFYKRLFRLLHQTLQMRNSTSDGTRDYIISPVKNDRGEFFCSEFSEGTMPKDADANGAYNIARKGLWVLEQIRQKDEGEKVNLSMTNAEWLKYAQLHLL

SEQ ID NO: 36 - protein, 1129 aa, Alicyclobacillus acidoterrestris
MAVKSIKVKLRLDDMPEIRAGLWKLHKEVNAGVRYYTEWLSLLRQENLYRRSPNGDGEQECDKTAEECKAELLERLRARQVENGHRGPAGSDDELLQLARQLYELLVPQAIGAKGDAQQIARKFLSPLADKDAVGGLGIAKAGNKPRWVRMREAGEPGWEEEKEKAETRKSADRTADVLRALADFGLKPLMRVYTDSEMSSVEWKPLRKGQAVRTWDRDMFQQAIERMMSWESWNQRVGQEYAKLVEQKNRFEQKNFVGQEHLVHLVNQLQQDMKEASPGLESKEQTAHYVTGRALRGSDKVFEKWGKLAPDAPFDLYDAEIKNVQRRNTRRFGSHDLFAKLAEPEYQALWREDASFLTRYAVYNSILRKLNHAKMFATFTLPDATAHPIWTRFDKLGGNLHQYTFLFNEFGERRHAIRFHKLLKVENGVAREVDDVTVPISMSEQLDNLLPRDPNEPIALYFRDYGAEQHFTGEFGGAKIQCRRDQLAHMHRRRGARDVYLNVSVRVQSQSEARGERRPPYAAVFRLVGDNHRAFVHFDKLSDYLAEHPDDGKLGSEGLLSGLRVMSVDLGLRTSASISVFRVARKDELKPNSKGRVPFFFPIKGNDNLVAVHERSQLLKLPGETESKDLRAIREERQRTLRQLRTQLAYLRLLVRCGSEDVGRRERSWAKLIEQPVDAANHMTPDWREAFENELQKLKSLHGICSDKEWMDAVYESVRRVWRHMGKQVRDWRKDVRSGERPKIRGYAKDVVGGNSIEQIEYLERQYKFLKSWSFFGKVSGQVIRAEKGSRFAITLREHIDHAKEDRLKKLADRIIMEALGYVYALDERGKGKWVAKYPPCQLILLEELSEYQFNNDRPPSENNQLMQWSHRGVFQELINQAQVHDLLVGTMYAAFSSRFDARTGAPGIRCRRVPARCTQEHNPEPFPWWLNKFVVEHTLDACPLRADDLIPTGEGEIFVSPFSAEEGDFHQIHADLNAAQNLQQRLWSDFDISQIRLRCDWGEVDGELVLIPRLTGKRTADSYSNKVFYTNTGVTYYERERGKKRRKVFAQEKLSEEEAELLVEADEAREKSVVLMRDPSGIINRGNWTRQKEFWSMVNQRIEGYLVKQIRSRVPLQDSACENTGDI

SEQ ID NO: 37 - protein, 1224 aa, Artificial Sequence
  source: /note="Description of Artificial Sequence: Synthetic polypeptide"
MKKIDNFVGCYPVSKTLRFKAIPIGKTQENIEKKRLVEEDEVRAKDYKAVKKLIDRYHREFIEGVLDNVKLDGLEEYYMLFNKSDREESDNKKIEIMEERFRRVISKSFKNNEEYKKIFSKKIIEEILPNYIKDEEEKELVKGFKGFYTAFVGYAQNRENMYSDEKKSTAISYRIVNENMPRFITNIKVFEKAKSILDVDKINEINEYILNNDYYVDDFFNIDFFNYVLNQKGIDIYNAIIGGIVTGDGRKIQGLNECINLYNQENKKIRLPQFKPLYKQILSESESMSFYIDEIESDDMLIDMLKESLQIDSTINNAIDDLKVLFNNIFDYDLSGIFINNGLPITTISNDVYGQWSTISDGWNERYDVLSNAKDKESEKYFEKRRKEYKKVKSFSISDLQELGGKDLSICKKINEIISEMIDDYKSKIEEIQYLFDIKELEKPLVTDLNKIELIKNSLDGLKRIERYVIPFLGTGKEQNRDEVFYGYFIKCIDAIKEIDGVYNKTRNYLTKKPYSKDKFKLYFENPQLMGGWDRNKESDYRSTLLRKNGKYYVAIIDKSSSNCMMNIEEDENDNYEKINYKLLPGPNKMLPKVFFSKKNREYFAPSKEIERIYSTGTFKKDTNFVKKDCENLITFYKDSLDRHEDWSKSFDFSFKESSAYRDISEFYRDVEKQGYRVSFDLLSSNAVNTLVEEGKLYLFQLYNKDFSEKSHGIPNLHTMYFRSLFDDNNKGNIRLNGGAEMFMRRASLNKQDVTVHKANQPIKNKNLLNPKKTTTLPYDVYKDKRFTEDQYEVHIPITMNKVPNNPYKINHMVREQLVKDDNPYVIGIDRGERNLIYVVVVDGQGHIVEQLSLNEIINENNGISIRTDYHTLLDAKERERDESRKQWKQIENIKELKEGYISQVVHKICELVEKYDAVIALEDLNSGFKNSRVKVEKQVYQKFEKMLITKLNYMVDKKKDYNKPGGVLNGYQLTTQFESFSKMGTQNGIMFYIPAWLTSKMDPTTGFVDLLKPKYKNKADAQKFFSQFDSIRYDNQEDAFVFKVNYTKFPRTDADYNKEWEIYTNGERIRVFRNPKKNNEYDYETVNVSERMKELFDSYDLLYDKGELKETICEMEESKFFEELIKLFRLTLQMRNSISGRTDVDYLISPVKNSNGYFYNSNDYKKEGAKYPKDADANGAYNIARKVLWAIEQFKMADEDKLDKTKISIKNQEWLEYAQTHCE

SEQ ID NO: 38 - protein, 500 aa, Artificial Sequence
  source: /note="Description of Artificial Sequence: Synthetic polypeptide"
MEVQKTVMKTLSLRILRPLYSQEIEKEIKEEKERRKQAGGTGELDGGFYKKLEKKHSEMFSFDRLNLLLNQLQREIAKVYNHAISELYIATIAQGNKSNKHYISSIVYNRAYGYFYNAYIALGICSKVEANFRSNELLTQQSALPTAKSDNFPIVLHKQKGAEGEDGGFRISTEGSDLIFEIPIPFYEYNGENRKEPYKWVKKGGQKPVLKLILSTFRRQRNKGWAKDEGTDAEIRKVTEGKYQVSQIEINRGKKLGEHQKWFANFSIEQPIYERKPNRSIVGGLDVGIRSPLVCAINNSFSRYSVDSNDVFKFSKQVFAFRRRLLSKNSLKRKGHGAAHKLEPITEMTEKNDKFRKKIIERWAKEVTNFFVKNQVGIVQIEDLSTMKDREDHFFNQYLRGFWPYYQMQTLIENKLKEYGIEVKRVQAKYTSQLCSNPNCRYWNNYFNFEYRKVNKFPKFKCEKCNLEISADYNAARNLSTPDIEKFVAKATKGINLPEK

SEQ ID NO: 39 - protein, 507 aa, Artificial Sequence
  source: /note="Description of Artificial Sequence: Synthetic polypeptide"
MEEAKTVSKTLSLRILRPLYSAEIEKEIKEEKERRKQGGKSGELDSGFYKKLEKKHTQMFGWDKLNLMLSQLQRQIARVFNQSISELYIETVIQGKKSNKHYTSKIVYNRAYSVFYNAYLALGITSKVEANFRSTELLMQKSSLPTAKSDNFPILLHKQKGVEGEEGGFKISADGNDLIFEIPIPFYEYDSANKKEPFKWIKKGGQKPTIKLILSTFRRQRNKGWAKDEGTDAEIRKVIEGKYQVSHIEINRGKKLGDHQKWFVNFTIEQPIYERKLDKNIIGGIDVGIKSPLVCAVNNSFARYSVDSNDVLKFSKQAFAFRRRLLSKNSLKRSGHGSKNKLDPITRMTEKNDRFRKKIIERWAKEVTNFFIKNQVGTVQIEDLSTMKDRQDNFFNQYLRGFWPYYQMQNLIENKLKEYGIETKRIKARYTSQLCSNPSCRHWNSYFSFDHRKTNNFPKFKCEKCALEISADYNAARNISTPDIEKFVAKATKGINLPDKNENVILE

SEQ ID NO: 40 - protein, 529 aa, Artificial Sequence
  source: /note="Description of Artificial Sequence: Synthetic polypeptide"
MAKNTITKTLKLRIVRPYNSAEVEKIVADEKNNREKIALEKNKDKVKEACSKHLKVAAYCTTQVERNACLFCKARKLDDKFYQKLRGQFPDAVFWQEISEIFRQLQKQAAEIYNQSLIELYYEIFIKGKGIANASSVEHYLSDVCYTRAAELFKNAAIASGLRSKIKSNFRLKELKNMKSGLPTTKSDNFPIPLVKQKGGQYTGFEISNHNSDFIIKIPFGRWQVKKEIDKYRPWEKFDFEQVQKSPKPISLLLSTQRRKRNKGWSKDEGTEAEIKKVMNGDYQTSYIEVKRGSKIGEKSAWMLNLSIDVPKIDKGVDPSIIGGIDVGVKSPLVCAINNAFSRYSISDNDLFHFNKKMFARRRILLKKNRHKRAGHGAKNKLKPITILTEKSERFRKKLIERWACEIADFFIKNKVGTVQMENLESMKRKEDSYFNIRLRGFWPYAEMQNKIEFKLKQYGIEIRKVAPNNTSKTCSKCGHLNNYFNFEYRKKNKFPHFKCEKCNFKENADYNAALNISNPKLKSTKEEP

SEQ ID NO: 41 - protein, 726 aa, Artificial Sequence
  source: /note="Description of Artificial Sequence: Synthetic polypeptide"
MERQKVPQIRKIVRVVPLRILRPKYSDVIENALKKFKEKGDDTNTNDFWRAIRDRDTEFFRKELNFSEDEINQLERDTLFRVGLDNRVLFSYFDFLQEKLMKDYNKIISKLFINRQSKSSFENDLTDEEVEELIEKDVTPFYGAYIGKGIKSVIKSNLGGKFIKSVKIDRETKKVTKLTAINIGLMGLPVAKSDTFPIKIIKTNPDYITFQKSTKENLQKIEDYETGIEYGDLLVQITIPWFKNENKDFSLIKTKEAIEYYKLNGVGKKDLLNINLVLTTYHIRKKKSWQIDGSSQSLVREMANGELEEKWKSFFDTFIKKYGDEGKSALVKRRVNKKSRAKGEKGRELNLDERIKRLYDSIKAKSFPSEINLIPENYKWKLHFSIEIPPMVNDIDSNLYGGIDFGEQNIATLCVKNIEKDDYDFLTIYGNDLLKHAQASYARRRIMRVQDEYKARGHGKSRKTKAQEDYSERMQKLRQKITERLVKQISDFFLWRNKFHMAVCSLRYEDLNTLYKGESVKAKRMRQFINKQQLFNGIERKLKDYNSEIYVNSRYPHYTSRLCSKCGKLNLYFDFLKFRTKNIIIRKNPDGSEIKYMPFFICEFCGWKQAGDKNASANIADKDYQDKLNKEKEFCNIRKPKSKKEDIGEENEEERDYSRRFNRNSFIYNSLKKDNKLNQEKLFDEWKNQLKRKIDGRNKFEPKEYKDRFSYLFAYYQEIIKNESES

SEQ ID NO: 42 - protein, 517 aa, Artificial Sequence
  source: /note="Description of Artificial Sequence: Synthetic polypeptide"
MVPTELITKTLQLRVIRPLYFEEIEKELAELKEQKEKEFEETNSLLLESKKIDAKSLKKLKRKARSSAAVEFWKIAKEKYPDILTKPEMEFIFSEMQKMMARFYNKSMTNIFIEMNNDEKVNPLSLISKASTEANQVIKCSSISSGLNRKIAGSINKTKFKQVRDGLISLPTARTETFPISFYKSTANKDEIPISKINLPSEEEADLTITLPFPFFEIKKEKKGQKAYSYFNIIEKSGRSNNKIDLLLSTHRRQRRKGWKEEGGTSAEIRRLMEGEFDKEWEIYLGEAEKSEKAKNDLIKNMTRGKLSKDIKEQLEDIQVKYFSDNNVESWNDLSKEQKQELSKLRKKKVEELKDWKHVKEILKTRAKIGWVELKRGKRQRDRNKWFVNITITRPPFINKELDDTKFGGIDLGVKVPFVCAVHGSPARLIIKENEILQFNKMVSARNRQITKDSEQRKGRGKKNKFIKKEIFNERNELFRKKIIERWANQIVKFFEDQKCATVQIENLESFDRTSYK

SEQ ID NO: 43 - protein, 481 aa, Artificial Sequence
  source: /note="Description of Artificial Sequence: Synthetic polypeptide"
MKSDTKDKKIIIHQTKTLSLRIVKPQSIPMEEFTDLVRYHQMIIFPVYNNGAIDLYKKLFKAKIQKGNEARAIKYFMNKIVYAPIANTVKNSYIALGYSTKMQSSFSGKRLWDLRFGEATPPTIKADFPLPFYNQSGFKVSSENGEFIIGIPFGQYTKKTVSDIEKKTSFAWDKFTLEDTTKKTLIELLLSTKTRKMNEGWKNNEGTEAEIKRVMDGTYQVTSLEILQRDDSWFVNFNIAYDSLKKQPDRDKIAGIHMGITRPLTAVIYNNKYRALSIYPNTVMHLTQKQLARIKEQRTNSKYATGGHGRNAKVTGTDTLSEAYRQRRKKIIEDWIASIVKFAINNEIGTIYLEDISNTNSFFAAREQKLIYLEDISNTNSFLSTYKYPISAISDTLQHKLEEKAIQVIRKKAYYVNQICSLCGHYNKGFTYQFRRKNKFPKMKCQGCLEATSTEFNAAANVANPDYEKLLIKHGLLQLKK

SEQ ID NO: 44 - protein, 358 aa, Artificial Sequence
  source: /note="Description of Artificial Sequence: Synthetic polypeptide"
MSTITRQVRLSPTPEQSRLLMAHCQQYISTVNVLVAAFDSEVLTGKVSTKDFRAALPSAVKNQALRDAQSVFKRSVELGCLPVLKKPHCQWNNQNWRVEGDQLILPICKDGKTQQERFRCAAVALEGKAGILRIKKKRGKWIADLTVTQEDAPESSGSAIMGVDLGIKVPAVAHIGGKGTRFFGNGRSQRSMRRRFYARRKTLQKAKKLRAVRKSKGKEARWMKTINHQLSRQIVNHAHALGVGTIKIEALQGIRKGTTRKSRGAAARKNNRMTNTWSFSQLTLFITYKAQRQGITVEQVDPAYTSQDCPACRARNGAQDRTYVCSECGWRGHRDTVGAINISRRAGLSGHRRGATGA

SEQ ID NO: 45 - protein, 507 aa, Artificial Sequence
  source: /note="Description of Artificial Sequence: Synthetic polypeptide"
MIAQKTIKIKLNPTKEQIIKLNSIIEEYIKVSNFTAKKIAEIQESFTDSGLTQGTCSECGKEKTYRKYHLLKKDNKLFCITCYKRKYSQFTLQKVEFQNKTGLRNVAKLPKTYYTNAIRFASDTFSGFDEIIKKKQNRLNSIQNRLNFWKELLYNPSNRNEIKIKVVKYAPKTDTREHPHYYSEAEIKGRIKRLEKQLKKFKMPKYPEFTSETISLQRELYSWKNPDELKISSITDKNESMNYYGKEYLKRYIDLINSQTPQILLEKENNSFYLCFPITKNIEMPKIDDTFEPVGIDWGITRNIAVVSILDSKTKKPKFVKFYSAGYILGKRKHYKSLRKHFGQKKRQDKINKLGTKEDRFIDSNIHKLAFLIVKEIRNHSNKPIILMENITDNREEAEKSMRQNILLHSVKSRLQNYIAYKALWNNIPTNLVKPEHTSQICNRCGHQDRENRPKGSKLFKCVKCNYMSNADFNASINIARKFYIGEYEPFYKDNEKMKSGVNSISM

SEQ ID NO: 46 - protein, 534 aa, Artificial Sequence
  source: /note="Description of Artificial Sequence: Synthetic polypeptide"
LKLSEQENITTGVKFKLKLDKETSEGLNDYFDEYGKAINFAIKVIQKELAEDRFAGKVRLDENKKPLLNEDGKKIWDFPNEFCSCGKQVNRYVNGKSLCQECYKNKFTEYGIRKRMYSAKGRKAEQDINIKNSTNKISKTHFNYAIREAFILDKSIKKQRKERFRRLREMKKKLQEFIEIRDGNKILCPKIEKQRVERYIHPSWINKEKKLEDFRGYSMSNVLGKIKILDRNIKREEKSLKEKGQINFKARRLMLDKSVKFLNDNKISFTISKNLPKEYELDLPEKEKRLNWLKEKIKIIKNQKPKYAYLLRKDDNFYLQYTLETEFNLKEDYSGIVGIDRGVSHIAVYTFVHNNGKNERPLFLNSSEILRLKNLQKERDRFLRRKHNKKRKKSNMRNIEKKIQLILHNYSKQIVDFAKNKNAFIVFEKLEKPKKNRSKMSKKSQYKLSQFTFKKLSDLVDYKAKREGIKVLYISPEYTSKECSHCGEKVNTQRPFNGNSSLFKCNKCGVELNADYNASINIAKKGLNILNSTN

SEQ ID NO: 47 - protein, 537 aa, Artificial Sequence
  source: /note="Description of Artificial Sequence: Synthetic polypeptide"
MEESIITGVKFKLRIDKETTKKLNEYFDEYGKAINFAVKIIQKELADDRFAGKAKLDQNKNPILDENGKKIYEFPDEFCSCGKQVNKYVNNKPFCQECYKIRFTENGIRKRMYSAKGRKAEHKINILNSTNKISKTHFNYAIREAFILDKSIKKQRKKRNERLRESKKRLQQFIDMRDGKREICPTIKGQKVDRFIHPSWITKDKKLEDFRGYTLSIINSKIKILDRNIKREEKSLKEKGQIIFKAKRLMLDKSIRFVGDRKVLFTISKTLPKEYELDLPSKEKRLNWLKEKIEIIKNQKPKYAYLLRKNIESEKKPNYEYYLQYTLEIKPELKDFYDGAIGIDRGINHIAVCTFISNDGKVTPPKFFSSGEILRLKNLQKERDRFLLRKHNKNRKKGNMRVIENKINLILHRYSKQIVDMAKKLNASIVFEELGRIGKSRTKMKKSQRYKLSLFIFKKLSDLVDYKSRREGIRVTYVPPEYTSKECSHCGEKVNTQRPFNGNYSLFKCNKCGIQLNSDYNASINIAKKGLKIPNST

SEQ ID NO: 48 - protein, 540 aa, Artificial Sequence
  source: /note="Description of Artificial Sequence: Synthetic polypeptide"
LWTIVIGDFIEMPKQDLVTTGIKFKLDVDKETRKKLDDYFDEYGKAINFAVKIIQKNLKEDRFAGKIALGEDKKPLLDKDGKKIYNYPNESCSCGNQVRRYVNAKPFCVDCYKLKFTENGIRKRMYSARGRKADSDINIKNSTNKISKTHFNYAIREGFILDKSLKKQRSKRIKKLLELKRKLQEFIDIRQGQMVLCPKIKNQRVDKFIHPSWLKRDKKLEEFRGYSLSVVEGKIKIFNRNILREEDSLRQRGHVNFKANRIMLDKSVRFLDGGKVNFNLNKGLPKEYLLDLPKKENKLSWLNEKISLIKLQKPKYAYLLRREGSFFIQYTIENVPKTFSDYLGAIGIDRGISHIAVCTFVSKNGVNKAPVFFSSGEILKLKSLQKQRDLFLRGKHNKIRKKSNMRNIDNKINLILHKYSRNIVNLAKSEKAFIVFEKLEKIKKSRFKMSKSLQYKLSQFTFKKLSDLVEYKAKIEGIKVDYVPPEYTSKECSHCGEKVDTQRPFNGNSSLFKCNKCRVQLNADYNASINIAKKSLNISN

SEQ ID NO: 49 - protein, 542 aa, Artificial Sequence
  source: /note="Description of Artificial Sequence: Synthetic polypeptide"
MSKTTISVKLKIIDLSSEKKEFLDNYFNEYAKATTFCQLRIRRLLRNTHWLGKKEKSSKKWIFESGICDLCGENKELVNEDRNSGEPAKICKRCYNGRYGNQMIRKLFVSTKKREVQENMDIRRVAKLNNTHYHRIPEEAFDMIKAADTAEKRRKKNVEYDKKRQMEFIEMFNDEKKRAARPKKPNERETRYVHISKLESPSKGYTLNGIKRKIDGMGKKIERAEKGLSRKKIFGYQGNRIKLDSNWVRFDLAESEITIPSLFKEMKLRITGPTNVHSKSGQIYFAEWFERINKQPNNYCYLIRKTSSNGKYEYYLQYTYEAEVEANKEYAGCLGVDIGCSKLAAAVYYDSKNKKAQKPIEIFTNPIKKIKMRREKLIKLLSRVKVRHRRRKLMQLSKTEPIIDYTCHKTARKIVEMANTAKAFISMENLETGIKQKQQARETKKQKFYRNMFLFRKLSKLIEYKALLKGIKIVYVKPDYTSQTCSSCGADKEKTERPSQAIFRCLNPTCRYYQRDINADFNAAVNIAKKALNNTEVVTTLL

SEQ ID NO: 50 - protein, 564 aa, Artificial Sequence
  source: /note="Description of Artificial Sequence: Synthetic polypeptide"
MARAKNQPYQKLTTTTGIKFKLDLSEEEGKRFDEYFSEYAKAVNFCAKVIYQLRKNLKFAGKKELAAKEWKFEISNCDFCNKQKEIYYKNIANGQKVCKGCHRTNFSDNAIRKKMIPVKGRKVESKFNIHNTTKKISGTHRHWAFEDAADIIESMDKQRKEKQKRLRREKRKLSYFFELFGDPAKRYELPKVGKQRVPRYLHKIIDKDSLTKKRGYSLSYIKNKIKISERNIERDEKSLRKASPIAFGARKIKMSKLDPKRAFDLENNVFKIPGKVIKGQYKFFGTNVANEHGKKFYKDRISKILAGKPKYFYLLRKKVAESDGNPIFEYYVQWSIDTETPAITSYDNILGIDAGITNLATTVLIPKNLSAEHCSHCGNNHVKPIFTKFFSGKELKAIKIKSRKQKYFLRGKHNKLVKIKRIRPIEQKVDGYCHVVSKQIVEMAKERNSCIALEKLEKPKKSKFRQRRREKYAVSMFVFKKLATFIKYKAAREGIEIIPVEPEGTSYTCSHCKNAQNNQRPYFKPNSKKSWTSMFKCGKCGIELNSDYNAAFNIAQKALNMTSA

SEQ ID NO: 51 - protein, 610 aa, Artificial Sequence
  source: /note="Description of Artificial Sequence: Synthetic polypeptide"
MDEKHFFCSYCNKELKISKNLINKISKGSIREDEAVSKAISIHNKKEHSLILGIKFKLFIENKLDKKKLNEYFDNYSKAVTFAARIFDKIRSPYKFIGLKDKNTKKWTFPKAKCVFCLEEKEVAYANEKDNSKICTECYLKEFGENGIRKKIYSTRGRKVEPKYNIFNSTKELSSTHYNYAIRDAFQLLDALKKQRQKKLKSIFNQKLRLKEFEDIFSDPQKRIELSLKPHQREKRYIHLSKSGQESINRGYTLRFVRGKIKSLTRNIEREEKSLRKKTPIHFKGNRLMIFPAGIKFDFASNKVKISISKNLPNEFNFSGTNVKNEHGKSFFKSRIELIKTQKPKYAYVLRKIKREYSKLRNYEIEKIRLENPNADLCDFYLQYTIETESRNNEEINGIIGIDRGITNLACLVLLKKGDKKPSGVKFYKGNKILGMKIAYRKHLYLLKGKRNKLRKQRQIRAIEPKINLILHQISKDIVKIAKEKNFAIALEQLEKPKKARFAQRKKEKYKLALFTFKNLSTLIEYKSKREGIPVIYVPPEKTSQMCSHCAINGDEHVDTQRPYKKPNAQKPSYSLFKCNKCGIELNADYNAAFNIAQKGLKTLMLNHSH

SEQ ID NO: 52 - protein, 369 aa, Artificial Sequence
  source: /note="Description of Artificial Sequence: Synthetic polypeptide"
MLQTLLVKLDPSKEQYKMLYETMERFNEACNQIAETVFAIHSANKIEVQKTVYYPIREKFGLSAQLTILAIRKVCEAYKRDKSIKPEFRLDGALVYDQRVLSWKGLDKVSLVTLQGRQIIPIKFGDYQKARMDRIRGQADLILVKGVFYLCVVVEVSEESPYDPKGVLGVDLGIKNLAVDSDGEVHSGEQTTNTRERLDSLKARLQSKGTKSAKRHLKKLSGRMAKFSKDVNHCISKKLVAKAKGTLMSIALEDLQGIRDRVTVRKAQRRNLHTWNFGLLRMFVDYKAKIAGVPLVFVDPRNTSRTCPSCGHVAKANRPTRDEFRCVSCGFAGAADHIAAMNIAFRAEVSQPIVTRFFVQSQAPSFRVG

SEQ ID NO: 53 - protein, 552 aa, Artificial Sequence
  source: /note="Description of Artificial Sequence: Synthetic polypeptide"
MDEEPDSAEPNLAPISVKLKLVKLDGEKLAALNDYFNEYAKAVNFCELKMQKIRKNLVNIRGTYLKEKKAWINQTGECCICKKIDELRCEDKNPDINGKICKKCYNGRYGNQMIRKLFVSTNKRAVPKSLDIRKVARLHNTHYHRIPPEAADIIKAIETAERKRRNRILFDERRYNELKDALENEEKRVARPKKPKEREVRYVPISKKDTPSKGYTMNALVRKVSGMAKKIERAKRNLNKRKKIEYLGRRILLDKNWVRFDFDKSEISIPTMKEFFGEMRFEITGPSNVMSPNGREYFTKWFDRIKAQPDNYCYLLRKESEDETDFYLQYTWRPDAHPKKDYTGCLGIDIGGSKLASAVYFDADKNRAKQPIQIFSNPIGKWKTKRQKVIKVLSKAAVRHKTKKLESLRNIEPRIDVHCHRIARKIVGMALAANAFISMENLEGGIREKQKAKETKKQKFSRNMFVFRKLSKLIEYKALMEGVKVVYIVPDYTSQLCSSCGTNNTKRPKQAIFMCQNTECRYFGKNINADFNAAINIAKKALNRKDIVRELS

SEQ ID NO: 54 - protein, 534 aa, Artificial Sequence
  source: /note="Description of Artificial Sequence: Synthetic polypeptide"
MEKNNSEQTSITTGIKFKLKLDKETKEKLNNYFDEYGKAINFAVRIIQMQLNDDRLAGKYKRDEKGKPILGEDGKKILEIPNDFCSCGNQVNHYVNGVSFCQECYKKRFSENGIRKRMYSAKGRKAEQDINIKNSTNKISKTHFNYAIREAFNLDKSIKKQREKRFKKLKDMKRKLQEFLEIRDGKRVICPKIEKQKVERYIHPSWINKEKKLEEFRGYSLSIVNSKIKSFDRNIQREEKSLKEKGQINFKAQRLMLDKSVKFLKDNKVSFTISKELPKTFELDLPKKEKKLNWLNEKLEIIKNQKPKYAYLLRKENNIFLQYTLDSIPEIHSEYSGAVGIDRGVSHIAVYTFLDKDGKNERPFFLSSSGILRLKNLQKERDKFLRKKHNKIRKKGNMRNIEQKINLILHEYSKQIVNFAKDKNAFIVFELLEKPKKSRERMSKKIQYKLSQFTFKKLSDLVDYKAKREGIKVIYVEPAYTSKDCSHCGERVNTQRPFNGNFSLFKCNKCGIVLNSDYNASLNIARKGLNISAN

SEQ ID NO: 55 - protein, 577 aa, Artificial Sequence
  source: /note="Description of Artificial Sequence: Synthetic polypeptide"
MAEEKFFFCEKCNKDIKIPKNYINKQGAEEKARAKHEHRVHALILGIKFKIYPKKEDISKLNDYFDEYAKAVTFTAKIVDKLKAPFLFAGKRDKDTSKKKWVFPVDKCSFCKEKTEINYRTKQGKNICNSCYLTEFGEQGLLEKIYATKGRKVSSSFNLFNSTKKLTGTHNNYVVKESLQLLDALKKQRSKRLKKLSNTRRKLKQFEEMFEKEDKRFQLPLKEKQRELRFIHVSQKDRATEFKGYTMNKIKSKIKVLRRNIEREQRSLNRKSPVFFRGTRIRLSPSVQFDDKDNKIKLTLSKELPKEYSFSGLNVANEHGRKFFAEKLKLIKENKSKYAYLLRRQVNKNNKKPIYDYYLQYTVEFLPNIITNYNGILGIDRGINTLACIVLLENKKEKPSFVKFFSGKGILNLKNKRRKQLYFLKGVHNKYRKQQKIRPIEPRIDQILHDISKQIIDLAKEKRVAISLEQLEKPQKPKFRQSRKAKYKLSQFNFKTLSNYIDYKAKKEGIRVIYIAPEMTSQNCSRCAMKNDLHVNTQRPYKNTSSLFKCNKCGVELNADYNAAFNIAQKGLKILNS

SEQ ID NO: 56 - protein, 613 aa, Artificial Sequence
  source: /note="Description of Artificial Sequence: Synthetic polypeptide"
MISLKLKLLPDEEQKKLLDEMFWKWASICTRVGFGRADKEDLKPPKDAEGVWFSLTQLNQANTDINDLREAMKHQKHRLEYEKNRLEAQRDDTQDALKNPDRREISTKRKDLFRPKASVEKGFLKLKYHQERYWVRRLKEINKLIERKTKTLIKIEKGRIKFKATRITLHQGSFKIRFGDKPAFLIKALSGKNQIDAPFVVVPEQPICGSVVNSKKYLDEITTNFLAYSVNAMLFGLSRSEEMLLKAKRPEKIKKKEEKLAKKQSAFENKKKELQKLLGRELTQQEEAIIEETRNQFFQDFEVKITKQYSELLSKIANELKQKNDFLKVNKYPILLRKPLKKAKSKKINNLSPSEWKYYLQFGVKPLLKQKSRRKSRNVLGIDRGLKHLLAVTVLEPDKKTFVWNKLYPNPITGWKWRRRKLLRSLKRLKRRIKSQKHETIHENQTRKKLKSLQGRIDDLLHNISRKIVETAKEYDAVIVVEDLQSMRQHGRSKGNRLKTLNYALSLFDYANVMQLIKYKAGIEGIQIYDVKPAGTSQNCAYCLLAQRDSHEYKRSQENSKIGVCLNPNCQNHKKQIDADLNAARVIASCYALKINDSQPFGTRKRFKKRTTN

SEQ ID NO: 57 - protein, 615 aa, Artificial Sequence
  source: /note="Description of Artificial Sequence: Synthetic polypeptide"
METLSLKLKLNPSKEQLLVLDKMFWKWASICTRLGLKKAEMSDLEPPKDAEGVWFSKTQLNQANTDVNDLRKAMQHQGKRIEYELDKVENRRNEIQEMLEKPDRRDISPNRKDLFRPKAAVEKGYLKLKYHKLGYWSKELKTANKLIERKRKTLAKIDAGKMKFKPTRISLHTNSFRIKFGEEPKIALSTTSKHEKIELPLITSLQRPLKTSCAKKSKTYLDAAILNFLAYSTNAALFGLSRSEEMLLKAKKPEKIEKRDRKLATKRESFDKKLKTLEKLLERKLSEKEKSVFKRKQTEFFDKFCITLDETYVEALHRIAEELVSKNKYLEIKKYPVLLRKPESRLRSKKLKNLKPEDWTYYIQFGFQPLLDTPKPIKTKTVLGIDRGVRHLLAVSIFDPRTKTFTFNRLYSNPIVDWKWRRRKLLRSIKRLKRRLKSEKHVHLHENQFKAKLRSLEGRIEDHFHNLSKEIVDLAKENNSVIVVENLGGMRQHGRGRGKWLKALNYALSHFDYAKVMQLIKYKAELAGVFVYDVAPAGTSINCAYCLLNDKDASNYTRGKVINGKKNTKIGECKTCKKEFDADLNAARVIALCYEKRLNDPQPFGTRKQFKPKKP

SEQ ID NO: 58 - protein, 775 aa, Artificial Sequence
  source: /note="Description of Artificial Sequence: Synthetic polypeptide"
MKALKLQLIPTRKQYKILDEMFWKWASLANRVSQKGESKETLAPKKDIQKIQFNATQLNQIEKDIKDLRGAMKEQQKQKERLLLQIQERRSTISEMLNDDNNKERDPHRPLNFRPKGWRKFHTSKHWVGELSKILRQEDRVKKTIERIVAGKISFKPKRIGIWSSNYKINFFKRKISINPLNSKGFELTLMTEPTQDLIGKNGGKSVLNNKRYLDDSIKSLLMFALHSRFFGLNNTDTYLLGGKINPSLVKYYKKNQDMGEFGREIVEKFERKLKQEINEQQKKIIMSQIKEQYSNRDSAFNKDYLGLINEFSEVFNQRKSERAEYLLDSFEDKIKQIKQEIGESLNISDWDFLIDEAKKAYGYEEGFTEYVYSKRYLEILNKIVKAVLITDIYFDLRKYPILLRKPLDKIKKISNLKPDEWSYYIQFGYDSINPVQLMSTDKFLGIDRGLTHLLAYSVFDKEKKEFIINQLEPNPIMGWKWKLRKVKRSLQHLERRIRAQKMVKLPENQMKKKLKSIEPKIEVHYHNISRKIVNLAKDYNASIVVESLEGGGLKQHGRKKNARNRSLNYALSLFDYGKIASLIKYKADLEGVPMYEVLPAYTSQQCAKCVLEKGSFVDPEIIGYVEDIGIKGSLLDSLFEGTELSSIQVLKKIKNKIELSARDNHNKEINLILKYNFKGLVIVRGQDKEEIAEHPIKEINGKFAILDFVYKRGKEKVGKKGNQKVRYTGNKKVGYCSKHGQVDADLNASRVIALCKYLDINDPILFGEQRKSFK

SEQ ID NO: 59 - protein, 777 aa, Artificial Sequence
  source: /note="Description of Artificial Sequence: Synthetic polypeptide"
MVTRAIKLKLDPTKNQYKLLNEMFWKWASLANRFSQKGASKETLAPKDGTQKIQFNATQLNQIKKDVDDLRGAMEKQGKQKERLLIQIQERLLTISEILRDDSKKEKDPHRPQNFRPFGWRRFHTSAYWSSEASKLTRQVDRVRRTIERIKAGKINFKPKRIGLWSSTYKINFLKKKINISPLKSKSFELDLITEPQQKIIGKEGGKSVANSKKYLDDSIKSLLIFAIKSRLFGLNNKDKPLFENIITPNLVRYHKKGQEQENFKKEVIKKFENKLKKEISQKQKEIIFSQIERQYENRDATFSEDYLRAISEFSEIFNQRKKERAKELLNSFNEKIRQLKKEVNGNISEEDLKILEVEAEKAYNYENGFIEWEYSEQFLGVLEKIARAVLISDNYFDLKKYPILIRKPTNKSKKITNLKPEEWDYYIQFGYGLINSPMKIETKNFMGIDRGLTHLLAYSIFDRDSEKFTINQLELNPIKGWKWKLRKVKRSLQHLERRMRAQKGVKLPENQMKKRLKSIEPKIESYYHNLSRKIVNLAKANNASIVVESLEGGGLKQHGRKKNSRHRALNYALSLFDYGKIASLIKYKSDLEGVPMYEVLPAYTSQQCAKCVLKKGSFVEPEIIGYIEEIGFKENLLTLLFEDTGLSSVQVLKKSKNKMTLSARDKEGKMVDLVLKYNFKGLVISQEKKKEEIVEFPIKEIDGKFAVLDSAYKRGKERISKKGNQKLVYTGNKKVGYCSVHGQVDADLNASRVIALCKYLGINEPIVFGEQRKSFK

SEQ ID NO: 60 - protein, 610 aa, Artificial Sequence
  source: /note="Description of Artificial Sequence: Synthetic polypeptide"
LDLITEPIQPHKSSSLRSKEFLEYQISDFLNFSLHSLFFGLASNEGPLVDFKIYDKIVIPKPEERFPKKESEEGKKLDSFDKRVEEYYSDKLEKKIERKLNTEEKNVIDREKTRIWGEVNKLEEIRSIIDEINEIKKQKHISEKSKLLGEKWKKVNNIQETLLSQEYVSLISNLSDELTNKKKELLAKKYSKFDDKIKKIKEDYGLEFDENTIKKEGEKAFLNPDKFSKYQFSSSYLKLIGEIARSLITYKGFLDLNKYPIIFRKPINKVKKIHNLEPDEWKYYIQFGYEQINNPKLETENILGIDRGLTHILAYSVFEPRSSKFILNKLEPNPIEGWKWKLRKLRRSIQNLERRWRAQDNVKLPENQMKKNLRSIEDKVENLYHNLSRKIVDLAKEKNACIVFEKLEGQGMKQHGRKKSDRLRGLNYKLSLFDYGKIAKLIKYKAEIEGIPIYRIDSAYTSQNCAKCVLESRRFAQPEEISCLDDFKEGDNLDKRILEGTGLVEAKIYKKLLKEKKEDFEIEEDIAMFDTKKVIKENKEKTVILDYVYTRRKEIIGTNHKKNIKGIAKYTGNTKIGYCMKHGQVDADLNASRTIALCKNFDINNPEIWK

SEQ ID NO: 61 - protein, 632 aa, Artificial Sequence
  source: /note="Description of Artificial Sequence: Synthetic polypeptide"
MSDESLVSSEDKLAIKIKIVPNAEQAKMLDEMFKKWSSICNRISRGKEDIETLRPDEGKELQFNSTQLNSATMDVSDLKKAMARQGERLEAEVSKLRGRYETIDASLRDPSRRHTNPQKPSSFYPSDWDISGRLTPRFHTARHYSTELRKLKAKEDKMLKTINKIKNGKIVFKPKRITLWPSSVNMAFKGSRLLLKPFANGFEMELPIVISPQKTADGKSQKASAEYMRNALLGLAGYSINQLLFGMNRSQKMLANAKKPEKVEKFLEQMKNKDANFDKKIKALEGKWLLDRKLKESEKSSIAVVRTKFFKSGKVELNEDYLKLLKHMANEILERDGFVNLNKYPILSRKPMKRYKQKNIDNLKPNMWKYYIQFGYEPIFERKASGKPKNIMGIDRGLTHLLAVAVFSPDQQKFLFNHLESNPIMHWKWKLRKIRRSIQHMERRIRAEKNKHIHEAQLKKRLGSIEEKTEQHYHIVSSKIINWAIEYEAAIVLESLSHMKQRGGKKSVRTRALNYALSLFDYEKVARLITYKARIRGIPVYDVLPGMTSKTCATCLLNGSQGAYVRGLETTKAAGKATKRKNMKIGKCMVCNSSENSMIDADLNAARVIAICKYKNLNDPQPAGSRKVFKRF

SEQ ID NO: 62 - protein, 625 aa, Artificial Sequence
  source: /note="Description of Artificial Sequence: Synthetic polypeptide"
MLALKLKIMPTEKQAEILDAMFWKWASICSRIAKMKKKVSVKENKKELSKKIPSNSDIWFSKTQLCQAEVDVGDHKKALKNFEKRQESLLDELKYKVKAINEVINDESKREIDPNNPSKFRIKDSTKKGNLNSPKFFTLKKWQKILQENEKRIKKKESTIEKLKRGNIFFNPTKISLHEEEYSINFGSSKLLLNCFYKYNKKSGINSDQLENKFNEFQNGLNIICSPLQPIRGSSKRSFEFIRNSIINFLMYSLYAKLFGIPRSVKALMKSNKDENKLKLEEKLKKKKSSFNKTVKEFEKMIGRKLSDNESKILNDESKKFFEIIKSNNKYIPSEEYLKLLKDISEEIYNSNIDFKPYKYSILIRKPLSKFKSKKLYNLKPTDYKYYLQLSYEPFSKQLIATKTILGIDRGLKHLLAVSVFDPSQNKFVYNKLIKNPVFKWKKRYHDLKRSIRNRERRIRALTGVHIHENQLIKKLKSMKNKINVLYHNVSKNIVDLAKKYESTIVLERLENLKQHGRSKGKRYKKLNYVLSNFDYKKIESLISYKAKKEGVPVSNINPKYTSKTCAKCLLEVNQLSELKNEYNRDSKNSKIGICNIHGQIDADLNAARVIALCYSKNLNEPHFK

SEQ ID NO: 63 - protein, 517 aa, Artificial Sequence
  source: /note="Description of Artificial Sequence: Synthetic polypeptide"
VINLFGYKFALYPNKTQEELLNKHLGECGWLYNKAIEQNEYYKADSNIEEAQKKFELLPDKNSDEAKVLRGNISKDNYVYRTLVKKKKSEINVQIRKAVVLRPAETIRNLAKVKKKGLSVGRLKFIPIREWDVLPFKQSDQIRLEENYLILEPYGRLKFKMHRPLLGKPKTFCIKRTATDRWTISFSTEYDDSNMRKNDGGQVGIDVGLKTHLRLSNENPDEDPRYPNPKIWKRYDRRLTILQRRISKSKKLGKNRTRLRLRLSRLWEKIRNSRADLIQNETYEILSENKLIAIEDLNVKGMQEKKDKKGRKGRTRAQEKGLHRSISDAAFSEFRRVLEYKAKRFGSEVKPVSAIDSSKECHNCGNKKGMPLESRIYECPKCGLKIDRDLNSAKVILARATGVRPGSNARADTKISATAGASVQTEGTVSEDFRQQMETSDQKPMQGEGSKEPPMNPEHKSSGRGSKHVNIGCKNKVGLYNEDENSRSTEKQIMDENRSTTEDMVEIGALHSPVLTT

SEQ ID NO: 64 - protein, 410 aa, Artificial Sequence
  source: /note="Description of Artificial Sequence: Synthetic polypeptide"
MIASIDYEAVSQALIVFEFKAKGKDSQYQAIDEAIRSYRFIRNSCLRYWMDNKKVGKYDLNKYCKVLAKQYPFANKLNSQARQSAAECSWSAISRFYDNCKRKVSGKKGFPKFKKHARSVEYKTSGWKLSENRKAITFTDKNGIGKLKLKGTYDLHFSQLEDMKRVRLVRRADGYYVQFCISVDVKVETEPTGKAIGLDVGIKYFLADSSGNTIENPQFYRKAEKKLNRANRRKSKKYIRGVKPQSKNYHKARCRYARKHLRVSRQRKEYCKRVAYCVIHSNDVVAYEDLNVKGMVKNRHLAKSISDVAWSTFRHWLEYFAIKYGKLTIPVAPHNTSQNCSNCDKKVPKSLSTRTHICHHCGYSEDRDVNAAKNILKKALSTVGQTGSLKLGEIEPLLVLEQSCTRKFDL

SEQ ID NO: 65 - protein, 486 aa, Artificial Sequence
  source: /note="Description of Artificial Sequence: Synthetic polypeptide"
LAEENTLHLTLAMSLPLNDLPENRTRSELWRRQWLPQKKLSLLLGVNQSVRKAAADCLRWFEPYQELLWWEPTDPDGKKLLDKEGRPIKRTAGHMRVLRKLEEIAPFRGYQLGSAVKNGLRHKVADLLLSYAKRKLDPQFTDKTSYPSIGDQFPIVWTGAFVCYEQSITGQLYLYLPLFPRGSHQEDITNNYDPDRGPALQVFGEKEIARLSRSTSGLLLPLQFDKWGEATFIRGENNPPTWKATHRRSDKKWLSEVLLREKDFQPKRVELLVRNGRIFVNVACEIPTKPLLEVENFMGVSFGLEHLVTVVVINRDGNVVHQRQEPARRYEKTYFARLERLRRRGGPFSQELETFHYRQVAQIVEEALRFKSVPAVEQVGNIPKGRYNPRLNLRLSYWPFGKLADLTSYKAVKEGLPKPYSVYSATAKMLCSTCGAANKEGDQPISLKGPTVYCGNCGTRHNTGFNTALNLARRAQELFVKGVVAR

SEQ ID NO: 66 - protein, 602 aa, Artificial Sequence
  source: /note="Description of Artificial Sequence: Synthetic polypeptide"
MSQSLLKWHDMAGRDKDASRSLQKSAVEGVLLHLTASHRVALEMLEKSVSQTVAVTMEAAQQRLVIVLEDDPTKATSRKRVISADLQFTREEFGSLPNWAQKLASTCPEIATKYADKHINSIRIAWGVAKESTNGDAVEQKLQWQIRLLDVTMFLQQLVLQLADKALLEQIPSSIRGGIGQEVAQQVTSHIQLLDSGTVLKAELPTISDRNSELARKQWEDAIQTVCTYALPFSRERARILDPGKYAAEDPRGDRLINIDPMWARVLKGPTVKSLPLLFVSGSSIRIVKLTLPRKHAAGHKHTFTATYLVLPVSREWINSLPGTVQEKVQWWKKPDVLATQELLVGKGALKKSANTLVIPISAGKKRFFNHILPALQRGFPLQWQRIVGRSYRRPATHRKWFAQLTIGYTNPSSLPEMALGIHFGMKDILWWALADKQGNILKDGSIPGNSILDFSLQEKGKIERQQKAGKNVAGKKYGKSLLNATYRVVNGVLEFSKGISAEHASQPIGLGLETIRFVDKASGSSPVNARHSNWNYGQLSGIFANKAGPAGFSVTEITLKKAQRDLSDAEQARVLAIEATKRFASRIKRLATKRKDDTLFV

SEQ ID NO: 67 - protein, 494 aa, Artificial Sequence
  source: /note="Description of Artificial Sequence: Synthetic polypeptide"
VEPVEKERFYYRTYTFRLDGQPRTQNLTTQSGWGLLTKAVLDNTKHYWEIVHHARIANQPIVFENPVIDEQGNPKLNKLGQPRFWKRPISDIVNQLRALFENQNPYQLGSSLIQGTYWDVAENLASWYALNKEYLAGTATWGEPSFPEPHPLTEINQWMPLTFSSGKVVRLLKNASGRYFIGLPILGENNPCYRMRTIEKLIPCDGKGRVTSGSLILFPLVGIYAQQHRRMTDICESIRTEKGKLAWAQVSIDYVREVDKRRRMRRTRKSQGWIQGPWQEVFILRLVLAHKAPKLYKPRCFAGISLGPKTLASCVILDQDERVVEKQQWSGSELLSLIHQGEERLRSLREQSKPTWNAAYRKQLKSLINTQVFTIVTFLRERGAAVRLESIARVRKSTPAPPVNFLLSHWAYRQITERLKDLAIRNGMPLTHSNGSYGVRFTCSQCGATNQGIKDPTKYKVDIESETFLCSICSHREIAAVNTATNLAKQLLDE

SEQ ID NO: 68 - protein, 526 aa, Artificial Sequence
  source: /note="Description of Artificial Sequence: Synthetic polypeptide"
MNDTETSETLTSHRTVCAHLHVVGETGSLPRLVEAALAELITLNGRATQALLSLAKNGLVLRRDKEENLIAAELTLPCRKNKYADVAAKAGEPILATRINNKGKLVTKKWYGEGNSYHIVRFTPETGMFTVRVFDRYAFDEELLHLHSEVVFGSDLPKGIKAKTDSLPANFLQAVFTSFLELPFQGFPDIVVKPAMKQAAEQLLSYVQLEAGENQQAEYPDTNERDPELRLVEWQKSLHELSVRTEPFEFVRARDIDYYAETDRRGNRFVNITPEWTKFAESPFARRLPLKIPPEFCILLRRKTEGHAKIPNRIYLGLQIFDGVTPDSTLGVLATAEDGKLFWWHDHLDEFSNLEGKPEPKLKNKPQLLMVSLEYDREQRFEESVGGDRKICLVTLKETRNFRRGWNGRILGIHFQHNPVITWALMDHDAEVLEKGFIEGNAFLGKALDKQALNEYLQKGGKWVGDRSFGNKLKGITHTLASLIVRLAREKDAWIALEEISWVQKQSADSVANHEIVEQPHHSLTR

SEQ ID NO: 69 - protein, 649 aa, Artificial Sequence
  source: /note="Description of Artificial Sequence: Synthetic polypeptide"
MNDTETSETLTSHRTVCAHLHVVGETGSLPRLVEAALAELITLNGRATQALLSLAKNGLVLRRDKEENLIAAELTLPCRKNKYADVAAKAGEPILATRINNKGKLVTKKWYGEGNSYHIVRFTPETGMFTVRVFDRYAFDEELLHLHSEVVFGSDLPKGIKAKTDSLPANFLQAVFTSFLELPFQGFPDIVVKPAMKQAAEQLLSYVQLEAGENQQAEYPDTNERDPELRLVEWQKSLHELSVRTEPFEFVRARDIDYYAETDRRGNRFVNITPEWTKFAESPFARRLPLKIPPEFCILLRRKTEGHAKIPNRIYLGLQIFDGVTPDSTLGVLATAEDGKLFWWHDHLDEFSNLEGKPEPKLKNKPQLLMVSLEYDREQRFEESVGGDRKICLVTLKETRNFRRGRHGHTRTDRLPAGNTLWRADFATSAEVAAPKWNGRILGIHFQHNPVITWALMDHDAEVLEKGFIEGNAFLGKALDKQALNEYLQKGGKWVGDRSFGNKLKGITHTLASLIVRLAREKDAWIALEEISWVQKQSADSVANRRFSMWNYSRLATLIEWLGTDIATRDCGTAAPLAHKVSDYLTHFTCPECGACRKAGQKKEIADTVRAGDILTCRKCGFSGPIPDNFIAEFVAKKALERMLKKKPV

SEQ ID NO: 70 - protein, 414 aa, Artificial Sequence
  source: /note="Description of Artificial Sequence: Synthetic polypeptide"
MAKRNFGEKSEALYRAVRFEVRPSKEELSILLAVSEVLRMLFNSALAERQQVFTEFIASLYAELKSASVPEEISEIRKKLREAYKEHSISLFDQINALTARRVEDEAFASVTRNWQEETLDALDGAYKSFLSLRRKGDYDAHSPRSRDSGFFQKIPGRSGFKIGEGRIALSCGAGRKLSFPIPDYQQGRLAETTKLKKFELYRDQPNLAKSGRFWISVVYELPKPEATTCQSEQVAFVALGASSIGVVSQRGEEVIALWRSDKHWVPKIEAVEERMKRRVKGSRGWLRLLNSGKRRMHMISSRQHVQDEREIVDYLVRNHGSHFVVTELVVRSKEGKLADSSKPERGGSLGLNWAAQNTGSLSRLVRQLEEKVKEHGGSVRKHKLTLTEAPPARGAENKLWMARKLRESFLKEV

SEQ ID NO: 71 - protein, 413 aa, Artificial Sequence
  source: /note="Description of Artificial Sequence: Synthetic polypeptide"
LAKNDEKELLYQSVKFEIYPDESKIRVLTRVSNILVLVWNSALGERRARFELYIAPLYEELKKFPRKSAESNALRQKIREGYKEHIPTFFDQLKKLLTPMRKEDPALLGSVPRAYQEETLNTLNGSFVSFMTLRRNNDMDAKPPKGRAEDRFHEISGRSGFKIDGSEFVLSTKEQKLRFPIPNYQLEKLKEAKQIKKFTLYQSRDRRFWISIAYEIELPDQRPFNPEEVIYIAFGASSIGVISPEGEKVIDFWRPDKHWKPKIKEVENRMRSCKKGSRAWKKRAAARRKMYAMTQRQQKLNHREIVASLLRLGFHFVVTEYTVRSKPGKLADGSNPKRGGAPQGFNWSAQNTGSFGEFILWLKQKVKEQGGTVQTFRLVLGQSERPEKRGRDNKIEMVRLLREKYLESQTIVV

SEQ ID NO: 72 - protein, 449 aa, Artificial Sequence
  source: /note="Description of Artificial Sequence: Synthetic polypeptide"
MAKGKKKEGKPLYRAVRFEIFPTSDQITLFLRVSKNLQQVWNEAWQERQSCYEQFFGSIYERIGQAKKRAQEAGFSEVWENEAKKGLNKKLRQQEISMQLVSEKESLLQELSIAFQEHGVTLYDQINGLTARRIIGEFALIPRNWQEETLDSLDGSFKSFLALRKNGDPDAKPPRQRVSENSFYKIPGRSGFKVSNGQIYLSFGKIGQTLTSVIPEFQLKRLETAIKLKKFELCRDERDMAKPGRFWISVAYEIPKPEKVPVVSKQITYLAIGASRLGVVSPKGEFCLNLPRSDYHWKPQINALQERLEGVVKGSRKWKKRMAACTRMFAKLGHQQKQHGQYEVVKKLLRHGVHFVVTELKVRSKPGALADASKSDRKGSPTGPNWSAQNTGNIARLIQKLTDKASEHGGTVIKRNPPLLSLEERQLPDAQRKIFIAKKLREEFLADQK

SEQ ID NO: 73 - protein, 711 aa, Artificial Sequence
  source: /note="Description of Artificial Sequence: Synthetic polypeptide"
MAKREKKDDVVLRGTKMRIYPTDRQVTLMDMWRRRCISLWNLLLNLETAAYGAKNTRSKLGWRSIWARVVEENHAKALIVYQHGKCKKDGSFVLKRDGTVKHPPRERFPGDRKILLGLFDALRHTLDKGAKCKCNVNQPYALTRAWLDETGHGARTADIIAWLKDFKGECDCTAISTAAKYCPAPPTAELLTKIKRAAPADDLPVDQAILLDLFGALRGGLKQKECDHTHARTVAYFEKHELAGRAEDILAWLIAHGGTCDCKIVEEAANHCPGPRLFIWEHELAMIMARLKAEPRTEWIGDLPSHAAQTVVKDLVKALQTMLKERAKAAAGDESARKTGFPKFKKQAYAAGSVYFPNTTMFFDVAAGRVQLPNGCGSMRCEIPRQLVAELLERNLKPGLVIGAQLGLLGGRIWRQGDRWYLSCQWERPQPTLLPKTGRTAGVKIAASIVFTTYDNRGQTKEYPMPPADKKLTAVHLVAGKQNSRALEAQKEKEKKLKARKERLRLGKLEKGHDPNALKPLKRPRVRRSKLFYKSAARLAACEAIERDRRDGFLHRVTNEIVHKFDAVSVQKMSVAPMMRRQKQKEKQIESKKNEAKKEDNGAAKKPRNLKPVRKLLRHVAMARGRQFLEYKYNDLRGPGSVLIADRLEPEVQECSRCGTKNPQMKDGRRLLRCIGVLPDGTDCDAVLPRNRNAARNAEKRLRKHREAHNA

SEQ ID NO: 74 - protein, 574 aa, Artificial Sequence
  source: /note="Description of Artificial Sequence: Synthetic polypeptide"
MNEVLPIPAVGEDAADTIMRGSKMRIYPSVRQAATMDLWRRRCIQLWNLLLELEQAAYSGENRRTQIGWRSIWATVVEDSHAEAVRVAREGKKRKDGTFRKAPSGKEIPPLDPAMLAKIQRQMNGAVDVDPKTGEVTPAQPRLFMWEHELQKIMARLKQAPRTHWIDDLPSHAAQSVVKDLIKALQAMLRERKKRASGIGGRDTGFPKFKKNRYAAGSVYFANTQLRFEAKRGKAGDPDAVRGEFARVKLPNGVGWMECRMPRHINAAHAYAQATLMGGRIWRQGENWYLSCQWKMPKPAPLPRAGRTAAIKIAAAIPITTVDNRGQTREYAMPPIDRERIAAHAAAGRAQSRALEARKRRAKKREAYAKKRHAKKLERGIAAKPPGRARIKLSPGFYAAAAKLAKLEAEDANAREAWLHEITTQIVRNFDVIAVPRMEVAKLMKKPEPPEEKEEQVKAPWQGKRRSLKAARVMMRRTAMALIQTTLKYKAVDLRGPQAYEEIAPLDVTAAACSGCGVLKPEWKMARAKGREIMRCQEPLPGGKTCNTVLTYTRNSARVIGRELAVRLAERQKA

SEQ ID NO: 75 - protein, 400 aa, Artificial Sequence
  source: /note="Description of Artificial Sequence: Synthetic polypeptide"
MTTQKTYNFCFYDQRFFELSKEAGEVYSRSLEEFWKIYDETGVWLSKFDLQKHMRNKLERKLLHSDSFLGAMQQVHANLASWKQAKKVVPDACPPRKPKFLQAILFKKSQIKYKNGFLRLTLGTEKEFLYLKWDINIPLPIYGSVTYSKTRGWKINLCLETEVEQKNLSENKYLSIDLGVKRVATIFDGENTITLSGKKFMGLMHYRNKLNGKTQSRLSHKKKGSNNYKKIQRAKRKTTDRLLNIQKEMLHKYSSFIVNYAIRNDIGNIIIGDNSSTHDSPNMRGKTNQKISQNPEQKLKNYIKYKFESISGRVDIVPEPYTSRKCPHCKNIKKSSPKGRTYKCKKCGFIFDRDGVGAINIYNENVSFGQIISPGRIRSLTEPIGMKFHNEIYFKSYVAA

SEQ ID NO: 76 - protein, 743 aa, Artificial Sequence
  source: /note="Description of Artificial Sequence: Synthetic polypeptide"
MSVRSFQARVECDKQTMEHLWRTHKVFNERLPEIIKILFKMKRGECGQNDKQKSLYKSISQSILEANAQNADYLLNSVSIKGWKPGTAKKYRNASFTWADDAAKLSSQGIHVYDKKQVLGDLPGMMSQMVCRQSVEAISGHIELTKKWEKEHNEWLKEKEKWESEDEHKKYLDLREKFEQFEQSIGGKITKRRGRWHLYLKWLSDNPDFAAWRGNKAVINPLSEKAQIRINKAKPNKKNSVERDEFFKANPEMKALDNLHGYYERNFVRRRKTKKNPDGFDHKPTFTLPHPTIHPRWFVFNKPKTNPEGYRKLILPKKAGDLGSLEMRLLTGEKNKGNYPDDWISVKFKADPRLSLIRPVKGRRVVRKGKEQGQTKETDSYEFFDKHLKKWRPAKLSGVKLIFPDKTPKAAYLYFTCDIPDEPLTETAKKIQWLETGDVTKKGKKRKKKVLPHGLVSCAVDLSMRRGTTGFATLCRYENGKIHILRSRNLWVGYKEGKGCHPYRWTEGPDLGHIAKHKREIRILRSKRGKPVKGEESHIDLQKHIDYMGEDRFKKAARTIVNFALNTENAASKNGFYPRADVLLLENLEGLIPDAEKERGINRALAGWNRRHLVERVIEMAKDAGFKRRVFEIPPYGTSQVCSKCGALGRRYSIIRENNRREIRFGYVEKLFACPNCGYCANADHNASVNLNRRFLIEDSFKSYYDWKRLSEKKQKEEIETIESKLMDKLCAMHKISRGSISK

SEQ ID NO: 77 - protein, 769 aa, Artificial Sequence
  source: /note="Description of Artificial Sequence: Synthetic polypeptide"
MHLWRTHCVFNQRLPALLKRLFAMRRGEVGGNEAQRQVYQRVAQFVLARDAKDSVDLLNAVSLRKRSANSAFKKKATISCNGQAREVTGEEVFAEAVALASKGVFAYDKDDMRAGLPDSLFQPLTRDAVACMRSHEELVATWKKEYREWRDRKSEWEAEPEHALYLNLRPKFEEGEAARGGRFRKRAERDHAYLDWLEANPQLAAWRRKAPPAVVPIDEAGKRRIARAKAWKQASVRAEEFWKRNPELHALHKIHVQYLREFVRPRRTRRNKRREGFKQRPTFTMPDPVRHPRWCLFNAPQTSPQGYRLLRLPQSRRTVGSVELRLLTGPSDGAGFPDAWVNVRFKADPRLAQLRPVKVPRTVTRGKNKGAKVEADGFRYYDDQLLIERDAQVSGVKLLFRDIRMAPFADKPIEDRLLSATPYLVFAVEIKDEARTERAKAIRFDETSELTKSGKKRKTLPAGLVSVAVDLDTRGVGFLTRAVIGVPEIQQTHHGVRLLQSRYVAVGQVEARASGEAEWSPGPDLAHIARHKREIRRLRQLRGKPVKGERSHVRLQAHIDRMGEDRFKKAARKIVNEALRGSNPAAGDPYTRADVLLYESLETLLPDAERERGINRALLRWNRAKLIEHLKRMCDDAGIRHFPVSPFGTSQVCSKCGALGRRYSLARENGRAVIRFGWVERLFACPNPECPGRRPDRPDRPFTCNSDHNASVNLHRVFALGDQAVAAFRALAPRDSPARTLAVKRVEDTLRPQLMRVHKLADAGVDSPF

SEQ ID NO: 78 - protein, 666 aa, Artificial Sequence
  source: /note="Description of Artificial Sequence: Synthetic polypeptide"
MATLVYRYGVRAHGSARQQDAVVSDPAMLEQLRLGHELRNALVGVQHRYEDGKRAVWSGFASVAAADHRVTTGETAVAELEKQARAEHSADRTAATRQGTAESLKAARAAVKQARADRKAAMAAVAEQAKPKIQALGDDRDAEIKDLYRRFCQDGVLLPRCGRCAGDLRSDGDCTDCGAAHEPRKLYWATYNAIREDHQTAVKLVEAKRKAGQPARLRFRRWTGDGTLTVQLQRMHGPACRCVTCAEKLTRRARKTDPQAPAVAADPAYPPTDPPRDPALLASGQGKWRNVLQLGTWIPPGEWSAMSRAERRRVGRSHIGWQLGGGRQLTLPVQLHRQMPADADVAMAQLTRVRVGGRHRMSVALTAKLPDPPQVQGLPPVALHLGWRQRPDGSLRVATWACPQPLDLPPAVADVVVSHGGRWGEVIMPARWLADAEVPPRLLGRRDKAMEPVLEALADWLEAHTEACTARMTPALVRRWRSQGRLAGLTNRWRGQPPTGSAEILTYLEAWRIQDKLLWERESHLRRRLAARRDDAWRRVASWLARHAGVLVVDDADIAELRRRDDPADTDPTMPASAAQAARARAALAAPGRLRHLATITATRDGLGVHTVASAGLTRLHRKCGHQAQPDPRYAASAVVTCPGCGNGYDQDYNAAMLMLDRQQQP

SEQ ID NO: 79 - protein, 564 aa, Artificial Sequence
  source: /note="Description of Artificial Sequence: Synthetic polypeptide"
MSRVELHRAYKFRLYPTPAQVAELAEWERQLRRLYNLAHSQRLAAMQRHVRPKSPGVLKSECLSCGAVAVAEIGTDGKAKKTVKHAVGCSVLECRSCGGSPDAEGRTAHTAACSFVDYYRQGREMTQLLEEDDQLARVVCSARQETLRDLEKAWQRWHKMPGFGKPHFKKRIDSCRIYFSTPKSWAVDLGYLSFTGVASSVGRIKIRQDRVWPGDAKFSSCHVVRDVDEWYAVFPLTFTKEIEKPKGGAVGINRGAVHAIADSTGRVVDSPKFYARSLGVIRHRARLLDRKVPFGRAVKPSPTKYHGLPKADIDAAAARVNASPGRLVYEARARGSIAAAEAHLAALVLPAPRQTSQLPSEGRNRERARRFLALAHQRVRRQREWFLHNESAHYAQSYTKIAIEDWSTKEMTSSEPRDAEEMKRVTRARNRSILDVGWYELGRQIAYKSEATGAEFAKVDPGLRETETHVPEAIVRERDVDVSGMLRGEAGISGTCSRCGGLLRASASGHADAECEVCLHVEVGDVNAAVNVLKRAMFPGAAPPSKEKAKVTIGIKGRKKKRAA

SEQ ID NO: 80 - protein, 565 aa, Artificial Sequence
  source: /note="Description of Artificial Sequence: Synthetic polypeptide"
MSRVELHRAYKFRLYPTPVQVAELSEWERQLRRLYNLGHEQRLLTLTRHLRPKSPGVLKGECLSCDSTQVQEVGADGRPKTTVRHAEQCPTLACRSCGALRDAEGRTAHTVACAFVDYYRQGREMTELLAADDQLARVVCSARQEVLRDLDKAWQRWRKMPGFGKPRFKRRTDSCRIYFSTPKAWKLEGGHLSFTGAATTVGAIKMRQDRNWPASVQFSSCHVVRDVDEWYAVFPLTFVAEVARPKGGAVGINRGAVHAIADSTGRVVDSPRYYARALGVIRHRARLFDRKVPSGHAVKPSPTKYRGLSAIEVDRVARATGFTPGRVVTEALNRGGVAYAECALAAIAVLGHGPERPLTSDGRNREKARKFLALAHQRVRRQREWFLHNESAHYARTYSKIAIEDWSTKEMTASEPQGEETRRVTRSRNRSILDVGWYELGRQLAYKTEATGAEFAQVDPGLKETETNVPKAIADARDVDVSGMLRGEAGISGTCSKCGGLLRAPASGHADAECEICLNVEVGDVNAAVNVLKRAMFPGDAPPASGEKPKVSIGIKGRQKKKKAA

SEQ ID NO: 81 - protein, 499 aa, Artificial Sequence
  source: /note="Description of Artificial Sequence: Synthetic polypeptide"
MEAIATGMSPERRVELGILPGSVELKRAYKFRLYPMKVQQAELSEWERQLRRLYNLAHEQRLAALLRYRDWDFQKGACPSCRVAVPGVHTAACDHVDYFRQAREMTQLLEVDAQLSRVICCARQEVLRDLDKAWQRWRKKLGGRPRFKRRTDSCRIYLSTPKHWEIAGRYLRLSGLASSVGEIRIEQDRAFPEGALLSSCSIVRDVDEWYACLPLTFTQPIERAPHRSVGLNRGVVHALADSDGRVVDSPKFFERALATVQKRSRDLARKVSGSRNAHKARIKLAKAHQRVRRQRAAFLHQESAYYSKGFDLVALEDMSVRKMTATAGEAPEMGRGAQRDLNRGILDVGWYELARQIDYKRLAHGGELLRVDPGQTTPLACVTEEQPARGISSACAVCGIPLARPASGNARMRCTACGSSQVGDVNAAENVLTRALSSAPSGPKSPKASIKIKGRQKRLGTPANRAGEASGGDPPVRGPVEGGTLAYVVEPVSESQSDT

SEQ ID NO: 82 - protein, 560 aa, Artificial Sequence
  source: /note="Description of Artificial Sequence: Synthetic polypeptide"
MTVRTYKYRAYPTPEQAEALTSWLRFASQLYNAALEHRKNAWGRHDAHGRGFRFWDGDAAPRKKSDPPGRWVYRGGGGAHISKNDQGKLLTEFRREHAELLPPGMPALVQHEVLARLERSMAAFFQRATKGQKAGYPRWRSEHRYDSLTFGLTSPSKERFDPETGESLGRGKTVGAGTYHNGDLRLTGLGELRILEHRRIPMGAIPKSVIVRRSGKRWFVSIAMEMPSVEPAASGRPAVGLDMGVVTWGTAFTADTSAAAALVADLRRMATDPSDCRRLEELEREAAQLSEVLAHCRARGLDPARPRRCPKELTKLYRRSLHRLGELDRACARIRRRLQAAHDIAEPVPDEAGSAVLIEGSNAGMRHARRVARTQRRVARRTRAGHAHSNRRKKAVQAYARAKERERSARGDHRHKVSRALVRQFEEISVEALDIKQLTVAPEHNPDPQPDLPAHVQRRRNRGELDAAWGAFFAALDYKAADAGGRVARKPAPHTTQECARCGTLVPKPISLRVHRCPACGYTAPRTVNSARNVLQRPLEEPGRAGPSGANGRGVPHAVA

SEQ ID NO: 83 - protein, 404 aa, Artificial Sequence
  source: /note="Description of Artificial Sequence: Synthetic polypeptide"
MNCRYRYRIYPTPGQRQSLARLFGCVRVVWNDALFLCRQSEKLPKNSELQKLCITQAKKTEARGWLGQVSAIPLQQSVADLGVAFKNFFQSRSGKRKGKKVNPPRVKRRNNRQGARFTRGGFKVKTSKVYLARIGDIKIKWSRPLPSEPSSVTVIKDCAGQYFLSFVVEVKPEIKPPKNPSIGIDLGLKTFASCSNGEKIDSPDYSRLYRKLKRCQRRLAKRQRGSKRRERMRVKVAKLNAQIRDKRKDFLHKLSTKVVNENQVIALEDLNVGGMLKNRKLSRAISQAGWYEFRSLCEGKAEKHNRDFRVISRWEPTSQVCSECGYRWGKIDLSVRSIVCINCGVEHDRDDNASVNIEQAGLKVGVGHTHDSKRTGSACKTSNGAVCVEPSTHREYVQLTLFDW

SEQ ID NO: 84 - protein, 392 aa, Artificial Sequence
  source: /note="Description of Artificial Sequence: Synthetic polypeptide"
MKSRWTFRCYPTPEQEQHLARTFGCVRFVWNWALRARTDAFRAGERIGYPATDKALTLLKQQPETVWLNEVSSVCLQQALRDLQVAFSNFFDKRAAHPSFKRKEARQSANYTERGFSFDHERRILKLAKIGAIKVKWSRKAIPHPSSIRLIRTASGKYFVSLVVETQPAPMPETGESVGVDFGVARLATLSNGERISNPKHGAKWQRRLAFYQKRLARATKGSKRRMRIKRHVARIHEKIGNSRSDTLHKLSTDLVTRFDLICVEDLNLRGMVKNHSLARSLHDASIGSAIRMIEEKAERYGKNVVKIDRWFPSSKTCSDCGHIVEQLPLNVREWTCPECGTTHDRDANAAANILAVGQTVSAHGGTVRRSRAKASERKSQRSANRQGVNRA

SEQ ID NO: 85 - protein, 500 aa, Artificial Sequence
  source: /note="Description of Artificial Sequence: Synthetic polypeptide"
KEPLNIGKTAKAVFKEIDPTSLNRAANYDASIELNCKECKFKPFKNVKRYEFNFYNNWYRCNPNSCLQSTYKAQVRKVEIGYEKLKNEILTQMQYYPWFGRLYQNFFHDERDKMTSLDEIQVIGVQNKVFFNTVEKAWREIIKKRFKDNKETMETIPELKHAAGHGKRKLSNKSLLRRRFAFVQKSFKFVDNSDVSYRSFSNNIACVLPSRIGVDLGGVISRNPKREYIPQEISFNAFWKQHEGLKKGRNIEIQSVQYKGETVKRIEADTGEDKAWGKNRQRRFTSLILKLVPKQGGKKVWKYPEKRNEGNYEYFPIPIEFILDSGETSIRFGGDEGEAGKQKHLVIPFNDSKATPLASQQTLLENSRFNAEVKSCIGLAIYANYFYGYARNYVISSIYHKNSKNGQAITAIYLESIAHNYVKAIERQLQNLLLNLRDFSFMESHKKELKKYFGGDLEGTGGAQKRREKEEKIEKEIEQSYLPRLIRLSLTKMVTKQVEM

SEQ ID NO: 86 - protein, 507 aa, Artificial Sequence
  source: /note="Description of Artificial Sequence: Synthetic polypeptide"
ELIVNENKDPLNIGKTAKAVFKEIDPTSINRAANYDASIELACKECKFKPFNNTKRHDFSFYSNWHRCSPNSCLQSTYRAKIRKTEIGYEKLKNEILNQMQYYPWFGRLYQNFFNDQRDKMTSLDEIQVTGVQNKIFFNTVEKAWREIIKKRFRDNKETMRTIPDLKNKSGHGSRKLSNKSLLRRRFAFAQKSFKLVDNSDVSYRAFSNNVACVLPSKIGVDIGGIINKDLKREYIPQEITFNVFWKQHDGLKKGRNIEIHSVQYKGEIVKRIEADTGEDKAWGKNRQRRFTSLILKITPKQGGKKIWKFPEKKNASDYEYFPIPIEFILDNGDASIKFGGEEGEVGKQKHLLIPFNDSKATPLSSKQMLLETSRFNAEVKSTIGLALYANYFVSYARNYVIKSTYHKNSKKGQIVTEIYLESISQNFVRAIQRQLQSLMLNLKDWGFMQTHKKELKKYFGSDLEGSKGGQKRREKEEKIEKEIEASYLPRLIRLSLTKSVTKAEEM

SEQ ID NO: 87 - protein, 529 aa, Artificial Sequence
  source: /note="Description of Artificial Sequence: Synthetic polypeptide"
PEEKTSKLKPNSINLAANYDANEKFNCKECKFHPFKNKKRYEFNFYNNLHGCKSCTKSTNNPAVKRIEIGYQKLKFEIKNQMEAYPWFGRLRINFYSDEKRKMSELNEMQVTGVKNKIFFDAIECAWREILKKRFRESKETLITIPKLKNKAGHGARKHRNKKLLIRRRAFMKKNFHFLDNDSISYRSFANNIACVLPSKVGVDIGGIISPDVGKDIKPVDISLNLMWASKEGIKSGRKVEIYSTQYDGNMVKKIEAETGEDKSWGKNRKRRQTSLLLSIPKPSKQVQEFDFKEWPRYKDIEKKVQWRGFPIKIIFDSNHNSIEFGTYQGGKQKVLPIPFNDSKTTPLGSKMNKLEKLRFNSKIKSRLGSAIAANKFLEAARTYCVDSLYHEVSSANAIGKGKIFIEYYLEILSQNYIEAAQKQLQRFIESIEQWFVADPFQGRLKQYFKDDLKRAKCFLCANREVQTTCYAAVKLHKSCAEKVKDKNKELAIKERNNKEDAVIKEVEASNYPRVIRLKLTKTITNKAM

SEQ ID NO: 88 - protein, 726 aa, Artificial Sequence
  source: /note="Description of Artificial Sequence: Synthetic polypeptide"
SESENKIIEQYYAFLYSFRDKYEKPEFKNRGDIKRKLQNKWEDFLKEQNLKNDKKLSNYIFSNRNFRRSYDREEENEEGIDEKKSKPKRINCFEKEKNLKDQYDKDAINASANKDGAQKWGCFECIFFPMYKIESGDPNKRIIINKTRFKLFDFYLNLKGCKSCLRSTYHPYRSNVYIESNYDKLKREIGNFLQQKNIFQRMRKAKVSEGKYLTNLDEYRLSCVAMHFKNRWLFFDSIQKVLRETIKQRLKQMRESYDEQAKTKRSKGHGRAKYEDQVRMIRRRAYSAQAHKLLDNGYITLFDYDDKEINKVCLTAINQEGFDIGGYLNSDIDNVMPPIEISFHLKWKYNEPILNIESPFSKAKISDYLRKIREDLNLERGKEGKARSKKNVRRKVLASKGEDGYKKIFTDFFSKWKEELEGNAMERVLSQSSGDIQWSKKKRIHYTTLVLNINLLDKKGVGNLKYYEIAEKTKILSFDKNENKFWPITIQVLLDGYEIGTEYDEIKQLNEKTSKQFTIYDPNTKIIKIPFTDSKAVPLGMLGINIATLKTVKKTERDIKVSKIFKGGLNSKIVSKIGKGIYAGYFPTVDKEILEEVEEDTLDNEFSSKSQRNIFLKSIIKNYDKMLKEQLFDFYSFLVRNDLGVRFLTDRELQNIEDESFNLEKRFFETDRDRIARWFDNTNTDDGKEKFKKLANEIVDSYKPRLIRLPVVRVIKRIQPVKQREM

SEQ ID NO: 89 - protein, 517 aa, Artificial Sequence
  source: /note="Description of Artificial Sequence: Synthetic polypeptide"
KYSTRDFSELNEIQVTACKQDEFFKVIQNAWREIIKKRFLENRENFIEKKIFKNKKGRGKRQESDKTIQRNRASVMKNFQLIENEKIILRAPSGHVACVFPVKVGLDIGGFKTDDLEKNIFPPRTITINVFWKNRDRQRKGRKLEVWGIKARTKLIEKVHKWDKLEEVKKKRLKSLEQKQEKSLDNWSEVNNDSFYKVQIDELQEKIDKSLKGRTMNKILDNKAKESKEAEGLYIEWEKDFEGEMLRRIEASTGGEEKWGKRRQRRHTSLLLDIKNNSRGSKEIINFYSYAKQGKKEKKIEFFPFPLTITLDAEEESPLNIKSIPIEDKNATSKYFSIPFTETRATPLSILGDRVQKFKTKNISGAIKRNLGSSISSCKIVQNAETSAKSILSLPNVKEDNNMEIFINTMSKNYFRAMMKQMESFIFEMEPKTLIDPYKEKAIKWFEVAASSRAKRKLKKLSKADIKKSELLLSNTEEFEKEKQEKLEALEKEIEEFYLPRIVRLQLTKTILETPVM

SEQ ID NO: 90 - protein, 481 aa, Artificial Sequence
  source: /note="Description of Artificial Sequence: Synthetic polypeptide"
KKLQLLGHKILLKEYDPNAVNAAANFETSTAELCGQCKMKPFKNKRRFQYTFGKNYHGCLSCIQNVYYAKKRIVQIAKEELKHQLTDSIASIPYKYTSLFSNTNSIDELYILKQERAAFFSNTNSIDELYITGIENNIAFKVISAIWDEIIKKRRQRYAESLTDTGTVKANRGHGGTAYKSNTRQEKIRALQKQTLHMVTNPYISLARYKNNYIVATLPRTIGMHIGAIKDRDPQKKLSDYAINFNVFWSDDRQLIELSTVQYTGDMVRKIEAETGENNKWGENMKRTKTSLLLEILTKKTTDELTFKDWAFSTKKEIDSVTKKTYQGFPIGIIFEGNESSVKFGSQNYFPLPFDAKITPPTAEGFRLDWLRKGSFSSQMKTSYGLAIYSNKVTNAIPAYVIKNMFYKIARAENGKQIKAKFLKKYLDIAGNNYVPFIIMQHYRVLDTFEEMPISQPKVIRLSLTKTQHIIIKKDKTDSKM

SEQ ID NO: 91 - protein, 534 aa, Artificial Sequence
  source: /note="Description of Artificial Sequence: Synthetic polypeptide"
NTSNLINLGKKAINISANYDANLEVGCKNCKFLSSNGNFPRQTNVKEGCHSCEKSTYEPSIYLVKIGERKAKYDVLDSLKKFTFQSLKYQSKKSMKSRNKKPKELKEFVIFANKNKAFDVIQKSYNHLILQIKKEINRMNSKKRKKNHKRRLFRDREKQLNKLRLIESSNLFLPRENKGNNHVFTYVAIHSVGRDIGVIGSYDEKLNFETELTYQLYFNDDKRLLYAYKPKQNKIIKIKEKLWNLRKEKEPLDLEYEKPLNKSITFSIKNDNLFKVSKDLMLRRAKFNIQGKEKLSKEERKINRDLIKIKGLVNSMSYGRFDELKKEKNIWSPHIYREVRQKEIKPCLIKNGDRIEIFEQLKKKMERLRRFREKRQKKISKDLIFAERIAYNFHTKSIKNTSNKINIDQEAKRGKASYMRKRIGYETFKNKYCEQCLSKGNVYRNVQKGCSCFENPFDWIKKGDENLLPKKNEDLRVKGAFRDEALEKQIVKIAFNIAKGYEDFYDNLGESTEKDLKLKFKVGTTINEQESLKL

SEQ ID NO: 92 - protein, 537 aa, Artificial Sequence
  source: /note="Description of Artificial Sequence: Synthetic polypeptide"
TSNPIKLGKKAINISANYDSNLQIGCKNCKFLSYNGNFPRQTNVKEGCHSCEKSTYEPPVYTVRIGERRSKYDVLDSLKKFIFLSLKYRQSKKMKTRSKGIRGLEEFVISANLKKAMDVIQKSYRHLILNIKNEIVRMNGKKRNKNHKRLLFRDREKQLNKLRLIEGSSFFKPPTVKGDNSIFTCVAIHNIGRDIGIAGDYFDKLEPKIELTYQLYYEYNPKKESEINKRLLYAYKPKQNKIIEIKEKLWNLRKEKSPLDLEYEKPLTKSITFLVKRDGVFRISKDLMLRKAKFIIQGKEKLSKEERKINRDLIKIKSNIISLTYGRFDELKKDKTIWSPHIFRDVKQGKITPCIERKGDRMDIFQQLRKKSERLRENRKKRQKKISKDLIFAERIAYNFHTKSIKNTSNLINIKHEAKRGKASYMRKRIGNETFRIKYCEQCFPKNNVYKNVQKGCSCFEDPFEYIKKGNEDLIPNKNQDLKAKGAFRDDALEKQIIKVAFNIAKGYEDFYENLKKTTEKDIRLKFKVGTIISEEM

SEQ ID NO: 93 - protein, 541 aa, Artificial Sequence
  source: /note="Description of Artificial Sequence: Synthetic polypeptide"
NNSINLSKKAINISANYDANLQVRCKNCKFLSSNGNFPRQTDVKEGCHSCEKSTYEPPVYDVKIGEIKAKYEVLDSLKKFTFQSLKYQLSKSMKFRSKKIKELKEFVIFAKESKALNVINRSYKHLILNIKNDINRMNSKKRIKNHKGRLFLDRQKQLSKLKLIEGSSFFVPAKNVGNKSVFTCVAIHSIGRDIGIAGLYDSFTKPVNEITYQIFFSGERRLLYAYKPKQLKILSIKENLWSLKNEKKPLDLLYEKPLGKNLNFNVKGGDLFRVSKDLMIRNAKFNVHGRQRLSDEERLINRNFIKIKGEVVSLSYGRFEELKKDRKLWSPHIFKDVRQNKIKPCLVMQGQRIDIFEQLKRKLELLKKIRKSRQKKLSKDLIFGERIAYNFHTKSIKNTSNKINIDSDAKRGRASYMRKRIGNETFKLKYCDVCFPKANVYRRVQNGCSCSENPYNYIKKGDKDLLPKKDEGLAIKGAFRDEKLNKQIIKVAFNIAKGYEDFYDDLKKRTEKDVDLKFKIGTTVLDQKPMEIFDGIVITWL

SEQ ID NO: 94 - protein, 542 aa, Artificial Sequence
  source: /note="Description of Artificial Sequence: Synthetic polypeptide"
LLTTVVETNNLAKKAINVAANFDANIDRQYYRCTPNLCRFIAQSPRETKEKDAGCSSCTQSTYDPKVYVIKIGKLLAKYEILKSLKRFLFMNRYFKQKKTERAQQKQKIGTELNEMSIFAKATNAMEVIKRATKHCTYDIIPETKSLQMLKRRRHRVKVRSLLKILKERRMKIKKIPNTFIEIPKQAKKNKSDYYVAAALKSCGIDVGLCGAYEKNAEVEAEYTYQLYYEYKGNSSTKRILYCYNNPQKNIREFWEAFYIQGSKSHVNTPGTIRLKMEKFLSPITIESEALDFRVWNSDLKIRNGQYGFIKKRSLGKEAREIKKGMGDIKRKIGNLTYGKSPSELKSIHVYRTERENPKKPRAARKKEDNFMEIFEMQRKKDYEVNKKRRKEATDAAKIMDFAEEPIRHYHTNNLKAVRRIDMNEQVERKKTSVFLKRIMQNGYRGNYCRKCIKAPEGSNRDENVLEKNEGCLDCIGSEFIWKKSSKEKKGLWHTNRLLRRIRLQCFTTAKAYENFYNDLFEKKESSLDIIKLKVSITTKSM

SEQ ID NO: 95 - protein, 564 aa, Artificial Sequence
  source: /note="Description of Artificial Sequence: Synthetic polypeptide"
ASTMNLAKQAINFAANYDSNLEIGCKGCKFMSTWSKKSNPKFYPRQNNQANKCHSCTYSTGEPEVPIIEIGERAAKYKIFTALKKFVFMSVAYKERRRQRFKSKKPKELKELAICSNREKAMEVIQKSVVHCYGDVKQEIPRIRKIKVLKNHKGRLFYKQKRSKIKIAKLEKGSFFKTFIPKVHNNGCHSCHEASLNKPILVTTALNTIGADIGLINDYSTIAPTETDISWQVYYEFIPNGDSEAVKKRLLYFYKPKGALIKSIRDKYFKKGHENAVNTGFFKYQGKIVKGPIKFVNNELDFARKPDLKSMKIKRAGFAIPSAKRLSKEDREINRESIKIKNKIYSLSYGRKKTLSDKDIIKHLYRPVRQKGVKPLEYRKAPDGFLEFFYSLKRKERRLRKQKEKRQKDMSEIIDAADEFAWHRHTGSIKKTTNHINFKSEVKRGKVPIMKKRIANDSFNTRHCGKCVKQGNAINKYYIEKQKNCFDCNSIEFKWEKAALEKKGAFKLNKRLQYIVKACFNVAKAYESFYEDFRKGEEESLDLKFKIGTTTTLKQYPQNKARAM

SEQ ID NO: 96 - protein, 610 aa, Artificial Sequence
  source: /note="Description of Artificial Sequence: Synthetic polypeptide"
HSHNLMLTKLGKQAINFAANYDANLEIGCKNCKFLSYSPKQANPKKYPRQTDVHEDGNIACHSCMQSTKEPPVYIVPIGERKSKYEILTSLNKFTFLALKYKEKKRQAFRAKKPKELQELAIAFNKEKAIKVIDKSIQHLILNIKPEIARIQRQKRLKNRKGKLLYLHKRYAIKMGLIKNGKYFKVGSPKKDGKKLLVLCALNTIGRDIGIIGNIEENNRSETEITYQLYFDCLDANPNELRIKEIEYNRLKSYERKIKRLVYAYKPKQTKILEIRSKFFSKGHENKVNTGSFNFENPLNKSISIKVKNSAFDFKIGAPFIMLRNGKFHIPTKKRLSKEEREINRTLSKIKGRVFRLTYGRNISEQGSKSLHIYRKERQHPKLSLEIRKQPDSFIDEFEKLRLKQNFISKLKKQRQKKLADLLQFADRIAYNYHTSSLEKTSNFINYKPEVKRGRTSYIKKRIGNEGFEKLYCETCIKSNDKENAYAVEKEELCFVCKAKPFTWKKTNKDKLGIFKYPSRIKDFIRAAFTVAKSYNDFYENLKKKDLKNEIFLKFKIGLILSHEKKNHISIAKSVAEDERISGKSIKNILNKSIKLEKNCYSCFFHKEDM

SEQ ID NO: 97 - protein, 552 aa, Artificial Sequence
  source: /note="Description of Artificial Sequence: Synthetic polypeptide"
SLERVIDKRNLAKKAINIAANFDANINKGFYRCETNQCMFIAQKPRKTNNTGCSSCLQSTYDPVIYVVKVGEMLAKYEILKSLKRFVFMNRSFKQKKTEKAKQKERIGGELNEMSIFANAALAMGVIKRAIRHCHVDIRPEINRLSELKKTKHRVAAKSLVKIVKQRKTKWKGIPNSFIQIPQKARNKDADFYVASALKSGGIDIGLCGTYDKKPHADPRWTYQLYFDTEDESEKRLLYCYNDPQAKIRDFWKTFYERGNPSMVNSPGTIEFRMEGFFEKMTPISIESKDFDFRVWNKDLLIRRGLYEIKKRKNLNRKAREIKKAMGSVKRVLANMTYGKSPTDKKSIPVYRVEREKPKKPRAVRKEENELADKLENYRREDFLIRNRRKREATEIAKIIDAAEPPIRHYHTNHLRAVKRIDLSKPVARKNTSVFLKRIMQNGYRGNYCKKCIKGNIDPNKDECRLEDIKKCICCEGTQNIWAKKEKLYTGRINVLNKRIKQMKLECFNVAKAYENFYDNLAALKEGDLKVLKLKVSIPALNPEASDPEEDM

SEQ ID NO: 98 - protein, 534 aa, Artificial Sequence
  source: /note="Description of Artificial Sequence: Synthetic polypeptide"
NASINLGKRAINLSANYDSNLVIGCKNCKFLSFNGNFPRQTNVREGCHSCDKSTYAPEVYIVKIGERKAKYDVLDSLKKFTFQSLKYQIKKSMRERSKKPKELLEFVIFANKDKAFNVIQKSYEHLILNIKQEINRMNGKKRIKNHKKRLFKDREKQLNKLRLIGSSSLFFPRENKGDKDLFTYVAIHSVGRDIGVAGSYESHIEPISDLTYQLFINNEKRLLYAYKPKQNKIIELKENLWNLKKEKKPLDLEFTKPLEKSITFSVKNDKLFKVSKDLMLRQAKFNIQGKEKLSKEERQINRDFSKIKSNVISLSYGRFEELKKEKNIWSPHIYREVKQKEIKPCIVRKGDRIELFEQLKRKMDKLKKFRKERQKKISKDLNFAERIAYNFHTKSIKNTSNKINIDQEAKRGKASYMRKRIGNESFRKKYCEQCFSVGNVYHNVQNGCSCFDNPIELIKKGDEGLIPKGKEDRKYKGALRDDNLQMQIIRVAFNIAKGYEDFYNNLKEKTEKDLKLKFKIGTTISTQESNNKEM

SEQ ID NO: 99 - protein, 577 aa, Artificial Sequence
  source: /note="Description of Artificial Sequence: Synthetic polypeptide"
SNLIKLGKQAINFAANYDANLEVGCKNCKFLSSTNKYPRQTNVHLDNKMACRSCNQSTMEPAIYIVRIGEKKAKYDIYNSLTKFNFQSLKYKAKRSQRFKPKQPKELQELSIAVRKEKALDIIQKSIDHLIQDIRPEIPRIKQQKRYKNHVGKLFYLQKRRKNKLNLIGKGSFFKVFSPKEKKNELLVICALTNIGRDIGLIGNYNTIINPLFEVTYQLYYDYIPKKNNKNVQRRLLYAYKSKNEKILKLKEAFFKRGHENAVNLGSFSYEKPLEKSLTLKIKNDKDDFQVSPSLRIRTGRFFVPSKRNLSRQEREINRRLVKIKSKIKNMTYGKFETARDKQSVHIFRLERQKEKLPLQFRKDEKEFMEEFQKLKRRTNSLKKLRKSRQKKLADLLQLSEKVVYNNHTGTLKKTSNFLNFSSSVKRGKTAYIKELLGQEGFETLYCSNCINKGQKTRYNIETKEKCFSCKDVPFVWKKKSTDKDRKGAFLFPAKLKDVIKATFTVAKAYEDFYDNLKSIDEKKPYIKFKIGLILAHVRHEHKARAKEEAGQKNIYNKPIKIDKNCKECFFFKEEAM

SEQ ID NO: 100 - protein, 613 aa, Artificial Sequence
  source: /note="Description of Artificial Sequence: Synthetic polypeptide"
NTTRKKFRKRTGFPQSDNIKLAYCSAIVRAANLDADIQKKHNQCNPNLCVGIKSNEQSRKYEHSDRQALLCYACNQSTGAPKVDYIQIGEIGAKYKILQMVNAYDFLSLAYNLTKLRNGKSRGHQRMSQLDEVVIVADYEKATEVIKRSINHLLDDIRGQLSKLKKRTQNEHITEHKQSKIRRKLRKLSRLLKRRRWKWGTIPNPYLKNWVFTKKDPELVTVALLHKLGRDIGLVNRSKRRSKQKLLPKVGFQLYYKWESPSLNNIKKSKAKKLPKRLLIPYKNVKLFDNKQKLENAIKSLLESYQKTIKVEFDQFFQNRTEEIIAEEQQTLERGLLKQLEKKKNEFASQKKALKEEKKKIKEPRKAKLLMEESRSLGFLMANVSYALFNTTIEDLYKKSNVVSGCIPQEPVVVFPADIQNKGSLAKILFAPKDGFRIKFSGQHLTIRTAKFKIRGKEIKILTKTKREILKNIEKLRRVWYREQHYKLKLFGKEVSAKPRFLDKRKTSIERRDPNKLADQTDDRQAELRNKEYELRHKQHKMAERLDNIDTNAQNLQTLSFWVGEADKPPKLDEKDARGFGVRTCISAWKWFMEDLLKKQEEDPLLKLKLSIM

SEQ ID NO: 101 - protein, 615 aa, Artificial Sequence
  source: /note="Description of Artificial Sequence: Synthetic polypeptide"
PKKPKFQKRTGFPQPDNLRKEYCLAIVRAANLDADFEKKCTKCEGIKTNKKGNIVKGRTYNSADKDNLLCYACNISTGAPAVDYVFVGALEAKYKILQMVKAYDFHSLAYNLAKLWKGRGRGHQRMGGLNEVVIVSNNEKALDVIEKSLNHFHDEIRGELSRLKAKFQNEHLHVHKESKLRRKLRKISRLLKRRRWKWDVIPNSYLRNFTFTKTRPDFISVALLHRVGRDIGLVTKTKIPKPTDLLPQFGFQIYYTWDEPKLNKLKKSRLRSEPKRLLVPYKKIELYKNKSVLEEAIRHLAEVYTEDLTICFKDFFETQKRKFVSKEKESLKRELLKELTKLKKDFSERKTALKRDRKEIKEPKKAKLLMEESRSLGFLAANTSYALFNLIAADLYTKSKKACSTKLPRQLSTILPLEIKEHKSTTSLAIKPEEGFKIRFSNTHLSIRTPKFKMKGADIKALTKRKREILKNATKLEKSWYGLKHYKLKLYGKEVAAKPRFLDKRNPSIDRRDPKELMEQIENRRNEVKDLEYEIRKGQHQMAKRLDNVDTNAQNLQTKSFWVGEADKPPELDSMEAKKLGLRTCISAWKWFMKDLVLLQEKSPNLKLKLSLTEM

SEQ ID NO: 102 - protein, 775 aa, Artificial Sequence
  source: /note="Description of Artificial Sequence: Synthetic polypeptide"
KFSKRQEGFLIPDNIDLYKCLAIVRSANLDADVQGHKSCYGVKKNGTYRVKQNGKKGVKEKGRKYVFDLIAFKGNIEKIPHEAIEEKDQGRVIVLGKFNYKLILNIEKNHNDRASLEIKNKIKKLVQISSLETGEFLSDLLSGKIGIDEVYGIIEPDVFSGKELVCKACQQSTYAPLVEYMPVGELDAKYKILSAIKGYDFLSLAYNLSRNRANKKRGHQKLGGGELSEVVISANYDKALNVIKRSINHYHVEIKPEISKLKKKMQNEPLKVMKQARIRRELHQLSRKVKRLKWKWGMIPNPELQNIIFEKKEKDFVSYALLHTLGRDIGLFKDTSMLQVPNISDYGFQIYYSWEDPKLNSIKKIKDLPKRLLIPYKRLDFYIDTILVAKVIKNLIELYRKSYVYETFGEEYGYAKKAEDILFDWDSINLSEGIEQKIQKIKDEFSDLLYEARESKRQNFVESFENILGLYDKNFASDRNSYQEKIQSMIIKKQQENIEQKLKREFKEVIERGFEGMDQNKKYYKVLSPNIKGGLLYTDTNNLGFFRSHLAFMLLSKISDDLYRKNNLVSKGGNKGILDQTPETMLTLEFGKSNLPNISIKRKFFNIKYNSSWIGIRKPKFSIKGAVIREITKKVRDEQRLIKSLEGVWHKSTHFKRWGKPRFNLPRHPDREKNNDDNLMESITSRREQIQLLLREKQKQQEKMAGRLDKIDKEIQNLQTANFQIKQIDKKPALTEKSEGKQSVRNALSAWKWFMEDLIKYQKRTPILQLKLAKM

SEQ ID NO: 103 - protein, 777 aa, Artificial Sequence
  source: /note="Description of Artificial Sequence: Synthetic polypeptide"
KFSKRQEGFVIPENIGLYKCLAIVRSANLDADVQGHVSCYGVKKNGTYVLKQNGKKSIREKGRKYASDLVAFKGDIEKIPFEVIEEKKKEQSIVLGKFNYKLVLDVMKGEKDRASLTMKNKSKKLVQVSSLGTDEFLLTLLNEKFGIEEIYGIIEPEVFSGKKLVCKACQQSTYAPLVEYMPVGELDSKYKILSAIKGYDFLSLAYNLARHRSNKKRGHQKLGGGELSEVVISANNAKALNVIKRSLNHYYSEIKPEISKLRKKMQNEPLKVGKQARMRRELHQLSRKVKRLKWKWGKIPNLELQNITFKESDRDFISYALLHTLGRDIGMFNKTEIKMPSNILGYGFQIYYDWEEPKLNTIKKSKNTPKRILIPYKKLDFYNDSILVARAIKELVGLFQESYEWEIFGNEYNYAKEAEVELIKLDEESINGNVEKKLQRIKENFSNLLEKAREKKRQNFIESFESIARLYDESFTADRNEYQREIQSFIIEKQKQSIEKKLKNEFKKIVEKKFNEQEQGKKHYRVLNPTIINEFLPKDKNNLGFLRSKIAFILLSKISDDLYKKSNAVSKGGEKGIIKQQPETILDLEFSKSKLPSINIKKKLFNIKYTSSWLGIRKPKFNIKGAKIREITRRVRDVQRTLKSAESSWYASTHFRRWGFPRFNQPRHPDKEKKSDDRLIESITLLREQIQILLREKQKGQKEMAGRLDDVDKKIQNLQTANFQIKQTGDKPALTEKSAGKQSFRNALSAWKWFMENLLKYQNKTPDLKLKIARTVM

SEQ ID NO: 104 - protein, 610 aa, Artificial Sequence
  source: /note="Description of Artificial Sequence: Synthetic polypeptide"
KWIEPNNIDFNKCLAITRSANLDADVQGHKMCYGIKTNGTYKAIGKINKKHNTGIIEKRRTYVYDLIVTKEKNEKIVKKTDFMAIDEEIEFDEKKEKLLKKYIKAEVLGTGELIRKDLNDGEKFDDLCSIEEPQAFRRSELVCKACNQSTYASDIRYIPIGEIEAKYKILKAIKGYDFLSLKYNLGRLRDSKKRGHQKMGQGELKEFVICANKEKALDVIKRSLNHYLNEVKDEISRLNKKMQNEPLKVNDQARWRRELNQISRRLKRLKWKWGEIPNPELKNLIFKSSRPEFVSYALIHTLGRDIGLINETELKPNNIQEYGFQIYYKWEDPELNHIKKVKNIPKRFIIPYKNLDLFGKYTILSRAIEGILKLYSSSFQYKSFKDPNLFAKEGEKKITNEDFELGYDEKIKKIKDDFKSYKKALLEKKKNTLEDSLNSILSVYEQSLLTEQINNVKKWKEGLLKSKESIHKQKKIENIEDIISRIEELKNVEGWIRTKERDIVNKEETNLKREIKKELKDSYYEEVRKDFSDLKKGEESEKKPFREEPKPIVIKDYIKFDVLPGENSALGFFLSHLSFNLFDSIQYELFEKSRLSSSKHPQIPETILDL

SEQ ID NO: 105 - protein, 632 aa, Artificial Sequence
  source: /note="Description of Artificial Sequence: Synthetic polypeptide"
FRKFVKRSGAPQPDNLNKYKCIAIVRAANLDADIMSNESSNCVMCKGIKMNKRKTAKGAAKTTELGRVYAGQSGNLLCTACTKSTMGPLVDYVPIGRIRAKYTILRAVKEYDFLSLAYNLARTRVSKKGGRQKMHSLSELVIAAEYEIAWNIIKSSVIHYHQETKEEISGLRKKLQAEHIHKNKEARIRREMHQISRRIKRLKWKWHMIPNSELHNFLFKQQDPSFVAVALLHTLGRDIGMINKPKGSAKREFIPEYGFQIYYKWMNPKLNDINKQKYRKMPKRSLIPYKNLNVFGDRELIENAMHKLLKLYDENLEVKGSKFFKTRVVAISSKESEKLKRDLLWKGELAKIKKDFNADKNKMQELFKEVKEPKKANALMKQSRNMGFLLQNISYGALGLLANRMYEASAKQSKGDATKQPSIVIPLEMEFGNAFPKLLLRSGKFAMNVSSPWLTIRKPKFVIKGNKIKNITKLMKDEKAKLKRLETSYHRATHFRPTLRGSIDWDSPYFSSPKQPNTHRRSPDRLSADITEYRGRLKSVEAELREGQRAMAKKLDSVDMTASNLQTSNFQLEKGEDPRLTEIDEKGRSIRNCISSWKKFMEDLMKAQEANPVIKIKIALKDESSVLSEDSM

SEQ ID NO: 106 - protein, 625 aa, Artificial Sequence
  source: /note="Description of Artificial Sequence: Synthetic polypeptide"
KFHPENLNKSYCLAIVRAANLDADIQGHINCIGIKSNKSDRNYENKLESLQNVELLCKACTKSTYKPNINSVPVGEKKAKYSILSEIKKYDFNSLVYNLKKYRKGKSRGHQKLNELRELVITSEYKKALDVINKSVNHYLVNIKNKMSKLKKILQNEHIHVGTLARIRRERNRISRKLDHYRKKWKFVPNKILKNYVFKNQSPDFVSVALLHKLGRDIGLITKTAILQKSFPEYSLQLYYKYDTPKLNYLKKSKFKSLPKRILISYKYPKFDINSNYIEESIDKLLKLYEESPIYKNNSKIIEFFKKSEDNLIKSENDSLKRGIMKEFEKVTKNFSSKKKKLKEELKLKNEDKNSKMLAKVSRPIGFLKAYLSYMLFNIISNRIFEFSRKSSGRIPQLPSCIINLGNQFENFKNELQDSNIGSKKNYKYFCNLLLKSSGFNISYEEEHLSIKTPNFFINGRKLKEITSEKKKIRKENEQLIKQWKKLTFFKPSNLNGKKTSDKIRFKSPNNPDIERKSEDNIVENIAKVKYKLEDLLSEQRKEFNKLAKKHDGVDVEAQCLQTKSFWIDSNSPIKKSLEKKNEKVSVKKKMKAIRSCISAWKWFMADLIEAQKETPMIKLKLALM

SEQ ID NO: 107 - protein, 517 aa, Artificial Sequence
  source: /note="Description of Artificial Sequence: Synthetic polypeptide"
TTLVPSHLAGIEVMDETTSRNEDMIQKETSRSNEDENYLGVKNKCGINVHKSGRGSSKHEPNMPPEKSGEGQMPKQDSTEMQQRFDESVTGETQVSAGATASIKTDARANSGPRVGTARALIVKASNLDRDIKLGCKPCEYIRSELPMGKKNGCNHCEKSSDIASVPKVESGFRKAKYELVRRFESFAADSISRHLGKEQARTRGKRGKKDKKEQMGKVNLDEIAILKNESLIEYTENQILDARSNRIKEWLRSLRLRLRTRNKGLKKSKSIRRQLITLRRDYRKWIKPNPYRPDEDPNENSLRLHTKLGVDIGVQGGDNKRMNSDDYETSFSITWRDTATRKICFTKPKGLLPRHMKFKLRGYPELILYNEELRIQDSQKFPLVDWERIPIFKLRGVSLGKKKVKALNRITEAPRLVVAKRIQVNIESKKKKVLTRYVYNDKSINGRLVKAEDSNKDPLLEFKKQAEEINSDAKYYENQEIAKNYLWGCEGLHKNLLEEQTKNPYLAFKYGFLNIV

SEQ ID NO: 108 - protein, 410 aa, Artificial Sequence
  source: /note="Description of Artificial Sequence: Synthetic polypeptide"
LDFKRTCSQELVLLPEIEGLKLSGTQGVTSLAKKLINKAANVDRDESYGCHHCIHTRTSLSKPVKKDCNSCNQSTNHPAVPITLKGYKIAFYELWHRFTSWAVDSISKALHRNKVMGKVNLDEYAVVDNSHIVCYAVRKCYEKRQRSVRLHKRAYRCRAKHYNKSQPKVGRIYKKSKRRNARNLKKEAKRYFQPNEITNGSSDALFYKIGVDLGIAKGTPETEVKVDVSICFQVYYGDARRVLRVRKMDELQSFHLDYTGKLKLKGIGNKDTFTIAKRNESLKWGSTKYEVSRAHKKFKPFGKKGSVKRKCNDYFRSIASWSCEAASQRAQSNLKNAFPYQKALVKCYKNLDYKGVKKNDMWYRLCSNRIFRYSRIAEDIAQYQSDKGKAKFEFVILAQSVAEYDISAIM

SEQ ID NO: 109 - protein, 602 aa, Artificial Sequence
  source: /note="Description of Artificial Sequence: Synthetic polypeptide"
VFLTDDKRKTALRKIRSAFRKTAEIALVRAQEADSLDRQAKKLTIETVSFGAPGAKNAFIGSLQGYNWNSHRANVPSSGSAKDVFRITELGLGIPQSAHEASIGKSFELVGNVVRYTANLLSKGYKKGAVNKGAKQQREIKGKEQLSFDLISNGPISGDKLINGQKDALAWWLIDKMGFHIGLAMEPLSSPNTYGITLQAFWKRHTAPRRYSRGVIRQWQLPFGRQLAPLIHNFFRKKGASIPIVLTNASKKLAGKGVLLEQTALVDPKKWWQVKEQVTGPLSNIWERSVPLVLYTATFTHKHGAAHKRPLTLKVIRISSGSVFLLPLSKVTPGKLVRAWMPDINILRDGRPDEAAYKGPDLIRARERSFPLAYTCVTQIADEWQKRALESNRDSITPLEAKLVTGSDLLQIHSTVQQAVEQGIGGRISSPIQELLAKDALQLVLQQLFMTVDLLRIQWQLKQEVADGNTSEKAVGWAIRISNIHKDAYKTAIEPCTSALKQAWNPLSGFEERTFQLDASIVRKRSTAKTPDDELVIVLRQQAAEMTVAVTQSVSKELMELAVRHSATLHLLVGEVASKQLSRSADKDRGAMDHWKLLSQSM

SEQ ID NO: 110 - protein, 494 aa, Artificial Sequence
  source: /note="Description of Artificial Sequence: Synthetic polypeptide"
EDLLQKALNTATNVAAIERHSCISCLFTESEIDVKYKTPDKIGQNTAGCQSCTFRVGYSGNSHTLPMGNRIALDKLRETIQRYAWHSLLFNVPPAPTSKRVRAISELRVAAGRERLFTVITFVQTNILSKLQKRYAANWTPKSQERLSRLREEGQHILSLLESGSWQQKEVVREDQDLIVCSALTKPGLSIGAFCRPKYLKPAKHALVLRLIFVEQWPGQIWGQSKRTRRMRRRKDVERVYDISVQAWALKGKETRISECIDTMRRHQQAYIGVLPFLILSGSTVRGKGDCPILKEITRMRYCPNNEGLIPLGIFYRGSANKLLRVVKGSSFTLPMWQNIETLPHPEPFSPEGWTATGALYEKNLAYWSALNEAVDWYTGQILSSGLQYPNQNEFLARLQNVIDSIPRKWFRPQGLKNLKPNGQEDIVPNEFVIPQNAIRAHHVIEWYHKTNDLVAKTLLGWGSQTTLNQTRPQGDLRFTYTRYYFREKEVPEV

SEQ ID NO: 111 - protein, 649 aa, Artificial Sequence
  source: /note="Description of Artificial Sequence: Synthetic polypeptide"
VPKKKLMRELAKKAVFEAIFNDPIPGSFGCKRCTLIDGARVTDAIEKKQGAKRCAGCEPCTFHTLYDSVKHALPAATGCDRTAIDTGLWEILTALRSYNWMSFRRNAVSDASQKQVWSIEELAIWADKERALRVILSALTHTIGKLKNGFSRDGVWKGGKQLYENLAQKDLAKGLFANGEIFGKELVEADHDMLAWTIVPNHQFHIGLIRGNWKPAAVEASTAFDARWLTNGAPLRDTRTHGHRGRRFNRTEKLTVLCIKRDGGVSEEFRQERDYELSVMLLQPKNKLKPEPKGELNSFEDLHDHWWFLKGDEATALVGLTSDPTVGDFIQLGLYIRNPIKAHGETKRRLLICFEPPIKLPLRRAFPSEAFKTWEPTINVFRNGRRDTEAYYDIDRARVFEFPETRVSLEHLSKQWEVLRLEPDRENTDPYEAQQNEGAELQVYSLLQEAAQKMAPKVVIDPFGQFPLELFSTFVAQLFNAPLSDTKAKIGKPLDSGFVVESHLHLLEEDFAYRDFVRVTFMGTEPTFRVIHYSNGEGYWKKTVLKGKNNIRTALIPEGAKAAVDAYKNKRCPLTLEAAILNEEKDRRLVLGNKALSLLAQTARGNLTILEALAAEVLRPLSGTEGVVHLHACVTRHSTLTESTETDNM

SEQ ID NO: 112 - protein, 414 aa, Artificial Sequence
  source: /note="Description of Artificial Sequence: Synthetic polypeptide"
VEKLFSERLKRAMWLKNEAGRAPPAETLTLKHKRVSGGHEKVKEELQRVLRSLSGTNQAAWNLGLSGGREPKSSDALKGEKSRVVLETVVFHSGHNRVLYDVIEREDQVHQRSSIMHMRRKGSNLLRLWGRSGKVRRKMREEVAEIKPVWHKDSRWLAIVEEGRQSVVGISSAGLAVFAVQESQCTTAEPKPLEYVVSIWFRGSKALNPQDRYLEFKKLKTTEALRGQQYDPIPFSLKRGAGCSLAIRGEGIKFGSRGPIKQFFGSDRSRPSHADYDGKRRLSLFSKYAGDLADLTEEQWNRTVSAFAEDEVRRATLANIQDFLSISHEKYAERLKKRIESIEEPVSASKLEAYLSAIFETFVQQREALASNFLMRLVESVALLISLEEKSPRVEFRVARYLAESKEGFNRKAM

SEQ ID NO: 113 - protein, 413 aa, Artificial Sequence
  source: /note="Description of Artificial Sequence: Synthetic polypeptide"
VVITQSELYKERLLRVMEIKNDRGRKEPRESQGLVLRFTQVTGGQEKVKQKLWLIFEGFSGTNQASWNFGQPAGGRKPNSGDALKGPKSRVTYETVVFHFGLRLLSAVIERHNLKQQRQTMAYMKRRAAARKKWARSGKKCSRMRNEVEKIKPKWHKDPRWFDIVKEGEPSIVGISSAGFAIYIVEEPNFPRQDPLEIEYAISIWFRRDRSQYLTFKKIQKAEKLKELQYNPIPFRLKQEKTSLVFESGDIKFGSRGSIEHFRDEARGKPPKADMDNNRRLTMFSVFSGNLTNLTEEQYARPVSGLLAPDEKRMPTLLKKLQDFFTPIHEKYGERIKQRLANSEASKRPFKKLEEYLPAIYLEFRARREGLASNWVLVLINSVRTLVRIKSEDPYIEFKVSQYLLEKEDNKAL

SEQ ID NO: 114 - protein, 449 aa, Artificial Sequence
  source: /note="Description of Artificial Sequence: Synthetic polypeptide"
KQDALFEERLKKAIFIKRQADPLQREELSLLPPNRKIVTGGHESAKDTLKQILRAINGTNQASWNPGTPSGKRDSKSADALAGPKSRVKLETVVFHVGHRLLKKVVEYQGHQKQQHGLKAFMRTCAAMRKKWKRSGKVVGELREQLANIQPKWHYDSRPLNLCFEGKPSVVGLRSAGIALYTIQKSVVPVKEPKPIEYAVSIWFRGPKAMDREDRCLEFKKLKIATELRKLQFEPIVSTLTQGIKGFSLYIQGNSVKFGSRGPIKYFSNESVRQRPPKADPDGNKRLALFSKFSGDLSDLTEEQWNRPILAFEGIIRRATLGNIQDYLTVGHEQFAISLEQLLSEKESVLQMSIEQQRLKKNLGKKAENEWVESFGAEQARKKAQGIREYISGFFQEYCSQREQWAENWVQQLNKSVRLFLTIQDSTPFIEFRVARYLPKGEKKKGKAM

SEQ ID NO: 115 - protein, 711 aa, Artificial Sequence
  source: /note="Description of Artificial Sequence: Synthetic polypeptide"
ANHAERHKRLRKEANRAANRNRPLVADCDTGDPLVGICRLLRRGDKMQPNKTGCRSCEQVEPELRDAILVSGPGRLDNYKYELFQRGRAMAVHRLLKRVPKLNRPKKAAGNDEKKAENKKSEIQKEKQKQRRMMPAVSMKQVSVADFKHVIENTVRHLFGDRRDREIAECAALRAASKYFLKSRRVRPRKLPKLANPDHGKELKGLRLREKRAKLKKEKEKQAELARSNQKGAVLHVATLKKDAPPMPYEKTQGRNDYTTFVISAAIKVGATRGTKPLLTPQPREWQCSLYWRDGQRWIRGGLLGLQAGIVLGPKLNRELLEAVLQRPIECRMSGCGNPLQVRGAAVDFFMTTNPFYVSGAAYAQKKFKPFGTKRASEDGAAAKAREKLMTQLAKVLDKVVTQAAHSPLDGIWETRPEAKLRAMIMALEHEWIFLRPGPCHNAAEEVIKCDCTGGHAILWALIDEARGALEHKEFYAVTRAHTHDCEKQKLGGRLAGFLDLLIAQDVPLDDAPAARKIKTLLEATPPAPCYKAATSIATCDCEGKFDKLWAIIDATRAGHGTEDLWARTLAYPQNVNCKCKAGKDLTHRLADFLGLLIKRDGPFRERPPHKVTGDRKLVFSGDKKCKGHQYVILAKAHNEEVVRAWISRWGLKSRTNKAGYAATELNLLLNWLSICRRRWMDMLTVQRDTPYIRMKTGRLVVDDKKERKAM

SEQ ID NO: 116 - protein, 574 aa, Artificial Sequence
  source: /note="Description of Artificial Sequence: Synthetic polypeptide"
AKQREALRVALERGIVRASNRTYTLVTNCTKGGPLPEQCRMIERGKARAMKWEPKLVGCGSCAAATVDLPAIEEYAQPGRLDVAKYKLTTQILAMATRRMMVRAAKLSRRKGQWPAKVQEEKEEPPEPKKMLKAVEMRPVAIVDFNRVIQTTIEHLWAERANADEAELKALKAAAAYFGPSLKIRARGPPKAAIGRELKKAHRKKAYAERKKARRKRAELARSQARGAAAHAAIRERDIPPMAYERTQGRNDVTTIPIAAAIKIAATRGARPLPAPKPMKWQCSLYWNEGQRWIRGGMLTAQAYAHAANIHRPMRCEMWGVGNPLKVRAFEGRVADPDGAKGRKAEFRLQTNAFYVSGAAYRNKKFKPFGTDRGGIGSARKKRERLMAQLAKILDKVVSQAAHSPLDDIWHTRPAQKLRAMIKQLEHEWMFLRPQAPTVEGTKPDVDVAGNMQRQIKALMAPDLPPIEKGSPAKRFTGDKRKKGERAVRVAEAHSDEVVTAWISRWGIQTRRNEGSYAAQELELLLNWLQICRRRWLDMTAAQRVSPYIRMKSGRMITDAADEGVAPIPLVENM

SEQ ID NO: 117 - protein, 743 aa, Artificial Sequence
  source: /note="Description of Artificial Sequence: Synthetic polypeptide"
KSISGRSIKHMACLKDMLKSEITEIEEKQKKESLRKWDYYSKFSDEILFRRNLNVSANHDANACYGCNPCAFLKEVYGFRIERRNNERIISYRRGLAGCKSCVQSTGYPPIEFVRRKFGADKAMEIVREVLHRRNWGALARNIGREKEADPILGELNELLLVDARPYFGNKSAANETNLAFNVITRAAKKFRDEGMYDIHKQLDIHSEEGKVPKGRKSRLIRIERKHKAIHGLDPGETWRYPHCGKGEKYGVWLNRSRLIHIKGNEYRCLTAFGTTGRRMSLDVACSVLGHPLVKKKRKKGKKTVDGTELWQIKKATETLPEDPIDCTFYLYAAKPTKDPFILKVGSLKAPRWKKLHKDFFEYSDTEKTQGQEKGKRVVRRGKVPRILSLRPDAKFKVSIWDDPYNGKNKEGTLLRMELSGLDGAKKPLILKRYGEPNTKPKNFVFWRPHITPHPLTFTPKHDFGDPNKKTKRRRVFNREYYGHLNDLAKMEPNAKFFEDREVSNKKNPKAKNIRIQAKESLPNIVAKNGRWAAFDPNDSLWKLYLHWRGRRKTIKGGISQEFQEFKERLDLYKKHEDESEWKEKEKLWENHEKEWKKTLEIHGSIAEVSQRCVMQSMMGPLDGLVQKKDYVHIGQSSLKAADDAWTFSANRYKKATGPKWGKISVSNLLYDANQANAELISQSISKYLSKQKDNQGCEGRKMKFLIKIIEPLRENFVKHTRWLHEMTQKDCEVRAQFSRVSM

SEQ ID NO: 118 - protein, 769 aa, Artificial Sequence
  source: /note="Description of Artificial Sequence: Synthetic polypeptide"
FPSDVGADALKHVRMLQPRLTDEVRKVALTRAPSDRPALARFAAVAQDGLAFVRHLNVSANHDSNCTFPRDPRDPRRGPCEPNPCAFLREVWGFRIVARGNERALSYRRGLAGCKSCVQSTGFPSVPFHRIGADDCMRKLHEILKARNWRLLARNIGREREADPLLTELSEYLLVDARTYPDGAAPNSGRLAENVIKRAAKKFRDEGMRDIHAQLRVHSREGKVPKGRLQRLRRIERKHRAIHALDPGPSWEAEGSARAEVQGVAVYRSQLLRVGHHTQQIEPVGIVARTLFGVGRTDLDVAVSVLGAPLTKRKKGSKTLESTEDFRIAKARETRAEDKIEVAFVLYPTASLLRDEIPKDAFPAMRIDRFLLKVGSVQADREILLQDDYYRFGDAEVKAGKNKGRTVTRPVKVPRLQALRPDAKFRVNVWADPFGAGDSPGTLLRLEVSGVTRRSQPLRLLRYGQPSTQPANFLCWRPHRVPDPMTFTPRQKFGERRKNRRTRRPRVFERLYQVHIKHLAHLEPNRKWFEEARVSAQKWAKARAIRRKGAEDIPVVAPPAKRRWAALQPNAELWDLYAHDREARKRFRGGRAAEGEEFKPRLNLYLAHEPEAEWESKRDRWERYEKKWTAVLEEHSRMCAVADRTLPQFLSDPLGARMDDKDYAFVGKSALAVAEAFVEEGTVERAQGNCSITAKKKFASNASRKRLSVANLLDVSDKADRALVFQAVRQYVQRQAENGGVEGRRMAFLRKLLAPLRQNFVCHTRWLHM

SEQ ID NO: 119 - protein, 564 aa, Artificial Sequence
  source: /note="Description of Artificial Sequence: Synthetic polypeptide"
AARKKKRGKIGITVKAKEKSPPAAGPFMARKLVNVAANVDGVEVHLCVECEADAHGSASARLLGGCRSCTGSIGAEGRLMGSVDVDRERVIAEPVHTETERLGPDVKAFEAGTAESKYAIQRGLEYWGVDLISRNRARTVRKMEEADRPESSTMEKTSWDEIAIKTYSQAYHASENHLFWERQRRVRQHALALFRRARERNRGESPLQSTQRPAPLVLAALHAEAAAISGRARAEYVLRGPSANVRAAAADIDAKPLGHYKTPSPKVARGFPVKRDLLRARHRIVGLSRAYFKPSDVVRGTSDAIAHVAGRNIGVAGGKPKEIEKTFTLPFVAYWEDVDRVVHCSSFKADGPWVRDQRIKIRGVSSAVGTFSLYGLDVAWSKPTSFYIRCSDIRKKFHPKGFGPMKHWRQWAKELDRLTEQRASCVVRALQDDEELLQTMERGQRYYDVFSCAATHATRGEADPSGGCSRCELVSCGVAHKVTKKAKGDTGIEAVAVAGCSLCESKLVGPSKPRVHRQMAALRQSHALNYLRRLQREWEALEAVQAPTPYLRFKYARHLEVRSM

SEQ ID NO: 120 - protein, 565 aa, Artificial Sequence
  source: /note="Description of Artificial Sequence: Synthetic polypeptide"
AAKKKKQRGKIGISVKPKEGSAPPADGPFMARKLVNVAANVDGVEVNLCIECEADAHGSAPARLLGGCKSCTGSIGAEGRLMGSVDVDRADAIAKPVNTETEKLGPDVQAFEAGTAETKYALQRGLEYWGVDLISRNRSRTVRRTEEGQPESATMEKTSWDEIAIKSYTRAYHASENHLFWERQRRVRQHALALFKRAKERNRGDSTLPREPGHGLVAIAALACEAYAVGGRNLAETVVRGPTFGTARAVRDVEIASLGRYKTPSPKVAHGSPVKRDFLRARHRIVGLARAYYRPSDVVRGTSDAIAHVAGRNIGVAGGKPRAVEAVFTLPFVAYWEDVDRVVHCSSFQVSAPWNRDQRMKIAGVTTAAGTFSLHGGELKWAKPTSFYIRCSDTRRKFRPKGFGPMKRWRQWAKDLDRLVEQRASCVVRALQDDAALLETMERGQRYYDVFACAVTHATRGEADRLAGCSRCALTPCQEAHRVTTKPRGDAGVEQVQTSDCSLCEGKLVGPSKPRLHRTLTLLRQEHGLNYLRRLQREWESLEAVQVPTPYLRFKYARHLEVRSM

SEQ ID NO: 121 - protein, 499 aa, Artificial Sequence
  source: /note="Description of Artificial Sequence: Synthetic polypeptide"
TDSQSESVPEVVYALTGGEVPGRVPPDGGSAEGARNAPTGLRKQRGKIKISAKPSKPGSPASSLARTLVNEAANVDGVQSSGCATCRMRANGSAPRALPIGCVACASSIGRAPQEETVCALPTTQGPDVRLLEGGHALRKYDIQRALEYWGVDLIGRNLDRQAGRGMEPAEGATATMKRVSMDELAVLDFGKSYYASEQHLFAARQRRVRQHAKALKIRAKHANRSGSVKRALDRSRKQVTALAREFFKPSDVVRGDSDALAHVVGRNLGVSRHPAREIPQTFTLPLCAYWEDVDRVISCSSLLAGEPFARDQEIRIEGVSSALGSLRLYRGAIEWHKPTSLYIRCSDTRRKFRPRGGLKKRWRQWAKDLDRLVEQRACCIVRSLQADVELLQTMERAQRFYDVHDCAATHVGPVAVRCSPCAGKQFDWDRYRLLAALRQEHALNYLRRLQREWESLEAQQVKMPYLRFKYARKLEVSGPLIGLEVRREPSMGTAIAEM

SEQ ID NO: 122 - protein, 358 aa, Artificial Sequence
  source: /note="Description of Artificial Sequence: Synthetic polypeptide"
AGTAGRRHGSLGARRSINIAGVTDRHGRWGCESCVYTRDQAGNRARCAPCDQSTYAPDVQEVTIGQRQAKYTIFLTLQSFSWTNTMRNNKRAAAGRSKRTTGKRIGQLAEIKITGVGLAHAHNVIQRSLQHNITKMWRAEKGKSKRVARLKKAKQLTKRRAYFRRRMSRQSRGNGFFRTGKGGIHAVAPVKIGLDVGMIASGSSEPADEQTVTLDAIWKGRKKKIRLIGAKGELAVAACRFREQQTKGDKCIPLILQDGEVRWNQNNWQCHPKKLVPLCGLEVSRKFVSQADRLAQNKVASPLAARFDKTSVKGTLVESDFAAVLVNVTSIYQQCHAMLLRSQEPTPSLRVQRTITSM

SEQ ID NO: 123 - protein, 369 aa, Artificial Sequence
  source: /note="Description of Artificial Sequence: Synthetic polypeptide"
GVRFSPAQSQVFFRTVIPQSVEARFAINMAAIHDAAGAFGCSVCRFEDRTPRNAKAVHGCSPCTRSTNRPDVFVLPVGAIKAKYDVFMRLLGFNWTHLNRRQAKRVTVRDRIGQLDELAISMLTGKAKAVLKKSICHNVDKSFKAMRGSLKKLHRKASKTGKSQLRAKLSDLRERTNTTQEGSHVEGDSDVALNKIGLDVGLVGKPDYPSEESVEVVVCLYFVGKVLILDAQGRIRDMRAKQYDGFKIPIIQRGQLTVLSVKDLGKWSLVRQDYVLAGDLRFEPKISKDRKYAECVKRIALITLQASLGFKERIPYYVTKQVEIKNASHIAFVTEAIQNCAENFREMTEYLMKYQEKSPDLKVLLTQLM

SEQ ID NO: 124 - protein, 486 aa, Artificial Sequence
  source: /note="Description of Artificial Sequence: Synthetic polypeptide"
RAVVGKVFLEQARRALNLATNFGTNHRTGCNGCYVTPGKLSIPQDGEKNAAGCTSCLMKATASYVSYPKPLGEKVAKYSTLDALKGFPWYSLRLNLRPNYRGKPINGVQEVAPVSKFRLAEEVIQAVQRYHFTELEQSFPGGRRRLRELRAFYTKEYRRAPEQRQHVVNGDRNIVVVTVLHELGFSVGMFNEVELLPKTPIECAVNVFIRGNRVLLEVRKPQFDKERLLVESLWKKDSRRHTAKWTPPNNEGRIFTAEGWKDFQLPLLLGSTSRSLRAIEKEGFVQLAPGRDPDYNNTIDEQHSGRPFLPLYLYLQGTISQEYCVFAGTWVIPFQDGISPYSTKDTFQPDLKRKAYSLLLDAVKHRLGNKVASGLQYGRFPAIEELKRLVRMHGATRKIPRGEKDLLKKGDPDTPEWWLLEQYPEFWRLCDAAAKRVSQNVGLLLSLKKQPLWQRRWLESRTRNEPLDNLPLSMALTLHLTNEEAL

SEQ ID NO: 125 - protein, 400 aa, Artificial Sequence
  source: /note="Description of Artificial Sequence: Synthetic polypeptide"
AAVYSKFYIENHFKMGIPETLSRIRGPSIIQGFSVNENYINIAGVGDRDFIFGCKKCKYTRGKPSSKKINKCHPCKRSTYPEPVIDVRGSISEFKYKIYNKLKQEPNQSIKQNTKGRMNPSDHTSSNDGIIINGIDNRIAYNVIFSSYKHLMEKQINLLRDTTKRKARQIKKYNNSGKKKHSLRSQTKGNLKNRYHMLGMFKKGSLTITNEGDFITAVRKVGLDISLYKNESLNKQEVETELCLNIKWGRTKSYTVSGYIPLPINIDWKLYLFEKETGLTLRLFGNKYKIQSKKFLIAQLFKPKRPPCADPVVKKAQKWSALNAHVQQMAGLFSDSHLLKRELKNRMHKQLDFKSLWVGTEDYIKWFEELSRSYVEGAEKSLEFFRQDYFCFNYTKQTTM

SEQ ID NO: 126 - protein, 666 aa, Artificial Sequence
  source: /note="Description of Artificial Sequence: Synthetic polypeptide"
PQQQRDLMLMAANYDQDYGNGCGPCTVVASAAYRPDPQAQHGCKRHLRTLGASAVTHVGLGDRTATITALHRLRGPAALAARARAAQAASAPMTPDTDAPDDRRRLEAIDADDVVLVGAHRALWSAVRRWADDRRAALRRRLHSEREWLLKDQIRWAELYTLIEASGTPPQGRWRNTLGALRGQSRWRRVLAPTMRATCAETHAELWDALAELVPEMAKDRRGLLRPPVEADALWRAPMIVEGWRGGHSVVVDAVAPPLDLPQPCAWTAVRLSGDPRQRWGLHLAVPPLGQVQPPDPLKATLAVSMRHRGGVRVRTLQAMAVDADAPMQRHLQVPLTLQRGGGLQWGIHSRGVRRREARSMASWEGPPIWTGLQLVNRWKGQGSALLAPDRPPDTPPYAPDAAVAPAQPDTKRARRTLKEACTVCRCAPGHMRQLQVTLTGDGTWRRFRLRAPQGAKRKAEVLKVATQHDERIANYTAWYLKRPEHAAGCDTCDGDSRLDGACRGCRPLLVGDQCFRRYLDKIEADRDDGLAQIKPKAQEAVAAMAAKRDARAQKVAARAAKLSEATGQRTAATRDASHEARAQKELEAVATEGTTVRHDAAAVSAFGSWVARKGDEYRHQVGVLANRLEHGLRLQELMAPDSVVADQQRASGHARVGYRYVLTAM

SEQ ID NO: 127 - protein, 560 aa, Artificial Sequence
  source: /note="Description of Artificial Sequence: Synthetic polypeptide"
AVAHPVGRGNAGSPGARGPEELPRQLVNRASNVTRPATYGCAPCRHVRLSIPKPVLTGCRACEQTTHPAPKRAVRGGADAAKYDLAAFFAGWAADLEGRNRRRQVHAPLDPQPDPNHEPAVTLQKIDLAEVSIEEFQRVLARSVKHRHDGRASREREKARAYAQVAKKRRNSHAHGARTRRAVRRQTRAVRRAHRMGANSGEILVASGAEDPVPEAIDHAAQLRRRIRACARDLEGLRHLSRRYLKTLEKPCRRPRAPDLGRARCHALVESLQAAERELEELRRCDSPDTAMRRLDAVLAAAASTDATFATGWTVVGMDLGVAPRGSAAPEVSPMEMAISVFWRKGSRRVIVSKPIAGMPIRRHELIRLEGLGTLRLDGNHYTGAGVTKGRGLSEGTEPDFREKSPSTLGFTLSDYRHESRWRPYGAKQGKTARQFFAAMSRELRALVEHQVLAPMGPPLLEAHERRFETLLKGQDNKSIHAGGGGRYVWRGPPDSKKRPAADGDWFRFGRGHADHRGWANKRHELAANYLQSAFRLWSTLAEAQEPTPYARYKYTRVTM

SEQ ID NO: 128 - protein, 404 aa, Artificial Sequence
  source: /note="Description of Artificial Sequence: Synthetic polypeptide"
WDFLTLQVYERHTSPEVCVAGNSTKCASGTRKSDHTHGVGVKLGAQEINVSANDDRDHEVGCNICVISRVSLDIKGWRYGCESCVQSTPEWRSIVRFDRNHKEAKGECLSRFEYWGAQSIARSLKRNKLMGGVNLDELAIVQNENVVKTSLKHLFDKRKDRIQANLKAVKVRMRERRKSGRQRKALRRQCRKLKRYLRSYDPSDIKEGNSCSAFTKLGLDIGISPNKPPKIEPKVEVVFSLFYQGACDKIVTVSSPESPLPRSWKIKIDGIRALYVKSTKVKFGGRTFRAGQRNNRRKVRPPNVKKGKRKGSRSQFFNKFAVGLDAVSQQLPIASVQGLWGRAETKKAQTICLKQLESNKPLKESQRCLFLADNWVVRVCGFLRALSQRQGPTPYIRYRYRCNM

SEQ ID NO: 129 - protein, 392 aa, Artificial Sequence
  source: /note="Description of Artificial Sequence: Synthetic polypeptide"
ARNVGQRNASRQSKRESAKARSRRVTGGHASVTQGVALINAAANADRDHTTGCEPCTWERVNLPLQEVIHGCDSCTKSSPFWRDIKVVNKGYREAKEEIMRIASGISADHLSRALSHNKVMGRLNLDEVCILDFRTVLDTSLKHLTDSRSNGIKEHIRAVHRKIRMRRKSGKTARALRKQYFALRRQWKAGHKPNSIREGNSLTALRAVGFDVGVSEGTEPMPAPQTEVVLSVFYKGSATRILRISSPHPIAKRSWKVKIAGIKALKLIRREHDFSFGRETYNASQRAEKRKFSPHAARKDFFNSFAVQLDRLAQQLCVSSVENLWVTEPQQKLLTLAKDTAPYGIREGARFADTRARLAWNWVFRVCGFTRALHQEQEPTPYCRFTWRSKM

SEQ ID NO: 130 - protein, 1120 aa, Listeria seeligeri
MWISIKTLIHHLGVLFFCDYMYNRREKKIIEVKTMRITKVEVDRKKVLISRDKNGGKLVYENEMQDNTEQIMHHKKSSFYKSVVNKTICRPEQKQMKKLVHGLLQENSQEKIKVSDVTKLNISNFLNHRFKKSLYYFPENSPDKSEEYRIEINLSQLLEDSLKKQQGTFICWESFSKDMELYINWAENYISSKTKLIKKSIRNNRIQSTESRSGQLMDRYMKDILNKNKPFDIQSVSEKYQLEKLTSALKATFKEAKKNDKEINYKLKSTLQNHERQIIEELKENSELNQFNIEIRKHLETYFPIKKTNRKVGDIRNLEIGEIQKIVNHRLKNKIVQRILQEGKLASYEIESTVNSNSLQKIKIEEAFALKFINACLFASNNLRNMVYPVCKKDILMIGEFKNSFKEIKHKKFIRQWSQFFSQEITVDDIELASWGLRGAIAPIRNEIIHLKKHSWKKFFNNPTFKVKKSKIINGKTKDVTSEFLYKETLFKDYFYSELDSVPELIINKMESSKILDYYSSDQLNQVFTIPNFELSLLTSAVPFAPSFKRVYLKGFDYQNQDEAQPDYNLKLNIYNEKAFNSEAFQAQYSLFKMVYYQVFLPQFTTNNDLFKSSVDFILTLNKERKGYAKAFQDIRKMNKDEKPSEYMSYIQSQLMLYQKKQEEKEKINHFEKFINQVFIKGFNSFIEKNRLTYICHPTKNTVPENDNIEIPFHTDMDDSNIAFWLMCKLLDAKQLSELRNEMIKFSCSLQSTEEISTFTKAREVIGLALLNGEKGCNDWKELFDDKEAWKKNMSLYVSEELLQSLPYTQEDGQTPVINRSIDLVKKYGTETILEKLFSSSDDYKVSAKDIAKLHEYDVTEKIAQQESLHKQWIEKPGLARDSAWTKKYQNVINDISNYQWAKTKVELTQVRHLHQLTIDLLSRLAGYMSIADRDFQFSSNYILERENSEYRVTSWILLSENKNKNKYNDYELYNLKNASIKVSSKNDPQLKVDLKQLRLTLEYLELFDNRLKEKRNNISHFNYLNGQLGNSILELFDDARDVLSYDRKLKNAVSKSLKEILSSHGMEVTFKPLYQTNHHLKIDKLQPKKIHHLGEKSTVSSNQVSNEYCQLVRTLLTMK

SEQ ID NO: 131 - protein, 1159 aa, Leptotrichia buccalis
MKVTKVGGISHKKYTSEGRLVKSESEENRTDERLSALLNMRLDMYIKNPSSTETKENQKRIGKLKKFFSNKMVYLKDNTLSLKNGKKENIDREYSETDILESDVRDKKNFAVLKKIYLNENVNSEELEVFRNDIKKKLNKINSLKYSFEKNKANYQKINENNIEKVEGKSKRNIIYDYYRESAKRDAYVSNVKEAFDKLYKEEDIAKLVLEIENLTKLEKYKIREFYHEIIGRKNDKENFAKIIYEEIQNVNNMKELIEKVPDMSELKKSQVFYKYYLDKEELNDKNIKYAFCHFVEIEMSQLLKNYVYKRLSNISNDKIKRIFEYQNLKKLIENKLLNKLDTYVRNCGKYNYYLQDGEIATSDFIARNRQNEAFLRNIIGVSSVAYFSLRNILETENENDITGRMRGKTVKNNKGEEKYVSGEVDKIYNENKKNEVKENLKMFYSYDFNMDNKNEIEDFFANIDEAISSIRHGIVHFNLELEGKDIFAFKNIAPSEISKKMFQNEINEKKLKLKIFRQLNSANVFRYLEKYKILNYLKRTRFEFVNKNIPFVPSFTKLYSRIDDLKNSLGIYWKTPKTNDDNKTKEIIDAQIYLLKNIYYGEFLNYFMSNNGNFFEISKEIIELNKNDKRNLKTGFYKLQKFEDIQEKIPKEYLANIQSLYMINAGNQDEEEKDTYIDFIQKIFLKGFMTYLANNGRLSLIYIGSDEETNTSLAEKKQEFDKFLKKYEQNNNIKIPYEINEFLREIKLGNILKYTERLNMFYLILKLLNHKELTNLKGSLEKYQSANKEEAFSDQLELINLLNLDNNRVTEDFELEADEIGKFLDFNGNKVKDNKELKKFDTNKIYFDGENIIKHRAFYNIKKYGMLNLLEKIADKAGYKISIEELKKYSNKKNEIEKNHKMQENLHRKYARPRKDEKFTDEDYESYKQAIENIEEYTHLKNKVEFNELNLLQGLLLRILHRLVGYTSIWERDLRFRLKGEFPENQYIEEIFNFENKKNVKYKGGQIVEKYIKFYKELHQNDEVKINKYSSANIKVLKQEKKDLYIRNYIAHFNYIPHAEISLLEVLENLRKLLSYDRKLKNAVMKSVVDILKEYGFVATFKIGADKKIGIQTLESEKIVHLKNLKKKKLMTDRNSEELCKLVKIMFEYKMEEKKSEN

SEQ ID NO: 132 - protein, 1389 aa, Leptotrichia shahii
MGNLFGHKRWYEVRDKKDFKIKRKVKVKRNYDGNKYILNINENNNKEKIDNNKFIRKYINYKKNDNILKEFTRKFHAGNILFKLKGKEGIIRIENNDDFLETEEVVLYIEAYGKSEKLKALGITKKKIIDEAIRQGITKDDKKIEIKRQENEEEIEIDIRDEYTNKTLNDCSIILRIIENDELETKKSIYEIFKNINMSLYKIIEKIIENETEKVFENRYYEEHLREKLLKDDKIDVILTNFMEIREKIKSNLEILGFVKFYLNVGGDKKKSKNKKMLVEKILNINVDLTVEDIADFVIKELEFWNITKRIEKVKKVNNEFLEKRRNRTYIKSYVLLDKHEKFKIERENKKDKIVKFFVENIKNNSIKEKIEKILAEFKIDELIKKLEKELKKGNCDTEIFGIFKKHYKVNFDSKKFSKKSDEEKELYKIIYRYLKGRIEKILVNEQKVRLKKMEKIEIEKILNESILSEKILKRVKQYTLEHIMYLGKLRHNDIDMTTVNTDDFSRLHAKEELDLELITFFASTNMELNKIFSRENINNDENIDFFGGDREKNYVLDKKILNSKIKIIRDLDFIDNKNNITNNFIRKFTKIGTNERNRILHAISKERDLQGTQDDYNKVINIIQNLKISDEEVSKALNLDVVFKDKKNIITKINDIKISEENNNDIKYLPSFSKVLPEILNLYRNNPKNEPFDTIETEKIVLNALIYVNKELYKKLILEDDLEENESKNIFLQELKKTLGNIDEIDENIIENYYKNAQISASKGNNKAIKKYQKKVIECYIGYLRKNYEELFDFSDFKMNIQEIKKQIKDINDNKTYERITVKTSDKTIVINDDFEYIISIFALLNSNAVINKIRNRFFATSVWLNTSEYQNIIDILDEIMQLNTLRNECITENWNLNLEEFIQKMKEIEKDFDDFKIQTKKEIFNNYYEDIKNNILTEFKDDINGCDVLEKKLEKIVIFDDETKFEIDKKSNILQDEQRKLSNINKKDLKKKVDQYIKDKDQEIKSKILCRIIFNSDFLKKYKKEIDNLIEDMESENENKFQEIYYPKERKNELYIYKKNLFLNIGNPNFDKIYGLISNDIKMADAKFLFNIDGKNIRKNKISEIDAILKNLNDKLNGYSKEYKEKYIKKLKENDDFFAKNIQNKNYKSFEKDYNRVSEYKKIRDLVEFNYLNKIESYLIDINWKLAIQMARFERDMHYIVNGLRELGIIKLSGYNTGISRAYPKRNGSDGFYTTTAYYKFFDEESYKKFEKICYGFGIDLSENSEINKPENESIRNYISHFYIVRNPFADYSIAEQIDRVSNLLSYSTRYNNSTYASVFEVFKKDVNLDYDELKKKFKLIGNNDILERLMKPKKVSVLELESYNSDYIKNLIIELLTKIENTNDTL

SEQ ID NO: 133 - protein, 1285 aa, Rhodobacter capsulatus
MQIGKVQGRTISEFGDPAGGLKRKISTDGKNRKELPAHLSSDPKALIGQWISGIDKIYRKPDSRKSDGKAIHSPTPSKMQFDARDDLGEAFWKLVSEAGLAQDSDYDQFKRRLHPYGDKFQPADSGAKLKFEADPPEPQAFHGRWYGAMSKRGNDAKELAAALYEHLHVDEKRIDGQPKRNPKTDKFAPGLVVARALGIESSVLPRGMARLARNWGEEEIQTYFVVDVAASVKEVAKAAVSAAQAFDPPRQVSGRSLSPKVGFALAEHLERVTGSKRCSFDPAAGPSVLALHDEVKKTYKRLCARGKNAARAFPADKTELLALMRHTHENRVRNQMVRMGRVSEYRGQQAGDLAQSHYWTSAGQTEIKESEIFVRLWVGAFALAGRSMKAWIDPMGKIVNTEKNDRDLTAAVNIRQVISNKEMVAEAMARRGIYFGETPELDRLGAEGNEGFVFALLRYLRGCRNQTFHLGARAGFLKEIRKELEKTRWGKAKEAEHVVLTDKTVAAIRAIIDNDAKALGARLLADLSGAFVAHYASKEHFSTLYSEIVKAVKDAPEVSSGLPRLKLLLKRADGVRGYVHGLRDTRKHAFATKLPPPPAPRELDDPATKARYIALLRLYDGPFRAYASGITGTALAGPAARAKEAATALAQSVNVTKAYSDVMEGRSSRLRPPNDGETLREYLSALTGETATEFRVQIGYESDSENARKQAEFIENYRRDMLAFMFEDYIRAKGFDWILKIEPGATAMTRAPVLPEPIDTRGQYEHWQAALYLVMHFVPASDVSNLLHQLRKWEALQGKYELVQDGDATDQADARREALDLVKRFRDVLVLFLKTGEARFEGRAAPFDLKPFRALFANPATFDRLFMATPTTARPAEDDPEGDGASEPELRVARTLRGLRQIARYNHMAVLSDLFAKHKVRDEEVARLAEIEDETQEKSQIVAAQELRTDLHDKVMKCHPKTISPEERQSYAAAIKTIEEHRFLVGRVYLGDHLRLHRLMMDVIGRLIDYAGAYERDTGTFLINASKQLGAGADWAVTIAGAANTDARTQTRKDLAHFNVLDRADGTPDLTALVNRAREMMAYDRKRKNAVPRSILDMLARLGLTLKWQMKDHLLQDATITQAAIKHLDKVRLTVGGPAAVTEARFSQDYLQMVAAVFNGSVQNPKPRRRDDGDAWHKPPKPATAQSQPDQKPPNKAPSAGSRLPPPQVGEVYEGVVVKVIDTGSLGFLAVEGVAGNIGLHISRLRRIREDAIIVGRRYRFRVEIYVPPKSNTSKLNAADLVRID

SEQ ID NO: 134 - protein, 1175 aa, Carnobacterium gallinarum
MRITKVKIKLDNKLYQVTMQKEEKYGTLKLNEESRKSTAEILRLKKASFNKSFHSKTINSQKENKNATIKKNGDYISQIFEKLVGVDTNKNIRKPKMSLTDLKDLPKKDLALFIKRKFKNDDIVEIKNLDLISLFYNALQKVPGEHFTDESWADFCQEMMPYREYKNKFIERKIILLANSIEQNKGFSINPETFSKRKRVLHQWAIEVQERGDFSILDEKLSKLAEIYNFKKMCKRVQDELNDLEKSMKKGKNPEKEKEAYKKQKNFKIKTIWKDYPYKTHIGLIEKIKENEELNQFNIEIGKYFEHYFPIKKERCTEDEPYYLNSETIATTVNYQLKNALISYLMQIGKYKQFGLENQVLDSKKLQEIGIYEGFQTKFMDACVFATSSLKNIIEPMRSGDILGKREFKEAIATSSFVNYHHFFPYFPFELKGMKDRESELIPFGEQTEAKQMQNIWALRGSVQQIRNEIFHSFDKNQKFNLPQLDKSNFEFDASENSTGKSQSYIETDYKFLFEAEKNQLEQFFIERIKSSGALEYYPLKSLEKLFAKKEMKFSLGSQVVAFAPSYKKLVKKGHSYQTATEGTANYLGLSYYNRYELKEESFQAQYYLLKLIYQYVFLPNFSQGNSPAFRETVKAILRINKDEARKKMKKNKKFLRKYAFEQVREMEFKETPDQYMSYLQSEMREEKVRKAEKNDKGFEKNITMNFEKLLMQIFVKGFDVFLTTFAGKELLLSSEEKVIKETEISLSKKINEREKTLKASIQVEHQLVATNSAISYWLFCKLLDSRHLNELRNEMIKFKQSRIKFNHTQHAELIQNLLPIVELTILSNDYDEKNDSQNVDVSAYFEDKSLYETAPYVQTDDRTRVSFRPILKLEKYHTKSLIEALLKDNPQFRVAATDIQEWMHKREEIGELVEKRKNLHTEWAEGQQTLGAEKREEYRDYCKKIDRFNWKANKVTLTYLSQLHYLITDLLGRMVGFSALFERDLVYFSRSFSELGGETYHISDYKNLSGVLRLNAEVKPIKIKNIKVIDNEENPYKGNEPEVKPFLDRLHAYLENVIGIKAVHGKIRNQTAHLSVLQLELSMIESMNNLRDLMAYDRKLKNAVTKSMIKILDKHGMILKLKIDENHKNFEIESLIPKEIIHLKDKAIKTNQVSEEYCQLVLALLTTNPGNQLN

SEQ ID NO: 135 - protein, 1285 aa, Herbinix hemicellulosilytica
MKLTRRRISGNSVDQKITAAFYRDMSQGLLYYDSEDNDCTDKVIESMDFERSWRGRILKNGEDDKNPFYMFVKGLVGSNDKIVCEPIDVDSDPDNLDILINKNLTGFGRNLKAPDSNDTLENLIRKIQAGIPEEEVLPELKKIKEMIQKDIVNRKEQLLKSIKNNRIPFSLEGSKLVPSTKKMKWLFKLIDVPNKTFNEKMLEKYWEIYDYDKLKANITNRLDKTDKKARSISRAVSEELREYHKNLRTNYNRFVSGDRPAAGLDNGGSAKYNPDKEEFLLFLKEVEQYFKKYFPVKSKHSNKSKDKSLVDKYKNYCSYKVVKKEVNRSIINQLVAGLIQQGKLLYYFYYNDTWQEDFLNSYGLSYIQVEEAFKKSVMTSLSWGINRLTSFFIDDSNTVKFDDITTKKAKEAIESNYFNKLRTCSRMQDHFKEKLAFFYPVYVKDKKDRPDDDIENLIVLVKNAIESVSYLRNRTFHFKESSLLELLKELDDKNSGQNKIDYSVAAEFIKRDIENLYDVFREQIRSLGIAEYYKADMISDCFKTCGLEFALYSPKNSLMPAFKNVYKRGANLNKAYIRDKGPKETGDQGQNSYKALEEYRELTWYIEVKNNDQSYNAYKNLLQLIYYHAFLPEVRENEALITDFINRTKEWNRKETEERLNTKNNKKHKNFDENDDITVNTYRYESIPDYQGESLDDYLKVLQRKQMARAKEVNEKEEGNNNYIQFIRDVVVWAFGAYLENKLKNYKNELQPPLSKENIGLNDTLKELFPEEKVKSPFNIKCRFSISTFIDNKGKSTDNTSAEAVKTDGKEDEKDKKNIKRKDLLCFYLFLRLLDENEICKLQHQFIKYRCSLKERRFPGNRTKLEKETELLAELEELMELVRFTMPSIPEISAKAESGYDTMIKKYFKDFIEKKVFKNPKTSNLYYHSDSKTPVTRKYMALLMRSAPLHLYKDIFKGYYLITKKECLEYIKLSNIIKDYQNSLNELHEQLERIKLKSEKQNGKDSLYLDKKDFYKVKEYVENLEQVARYKHLQHKINFESLYRIFRIHVDIAARMVGYTQDWERDMHFLFKALVYNGVLEERRFEAIFNNNDDNNDGRIVKKIQNNLNNKNRELVSMLCWNKKLNKNEFGAIIWKRNPIAHLNHFTQTEQNSKSSLESLINSLRILLAYDRKRQNAVTKTINDLLLNDYHIRIKWEGRVDEGQIYFNIKEKEDIENEPIIHLKHLHKKDCYIYKNSYMFDKQKEWICNGIKEEVYDKSILKCIGNLFKFDYEDKNKSSANPKHT

SEQ ID NO: 136 - protein, 1154 aa, Paludibacter propionicigenes
MRVSKVKVKDGGKDKMVLVHRKTTGAQLVYSGQPVSNETSNILPEKKRQSFDLSTLNKTIIKFDTAKKQKLNVDQYKIVEKIFKYPKQELPKQIKAEEILPFLNHKFQEPVKYWKNGKEESFNLTLLIVEAVQAQDKRKLQPYYDWKTWYIQTKSDLLKKSIENNRIDLTENLSKRKKALLAWETEFTASGSIDLTHYHKVYMTDVLCKMLQDVKPLTDDKGKINTNAYHRGLKKALQNHQPAIFGTREVPNEANRADNQLSIYHLEVVKYLEHYFPIKTSKRRNTADDIAHYLKAQTLKTTIEKQLVNAIRANIIQQGKTNHHELKADTTSNDLIRIKTNEAFVLNLTGTCAFAANNIRNMVDNEQTNDILGKGDFIKSLLKDNTNSQLYSFFFGEGLSTNKAEKETQLWGIRGAVQQIRNNVNHYKKDALKTVFNISNFENPTITDPKQQTNYADTIYKARFINELEKIPEAFAQQLKTGGAVSYYTIENLKSLLTTFQFSLCRSTIPFAPGFKKVFNGGINYQNAKQDESFYELMLEQYLRKENFAEESYNARYFMLKLIYNNLFLPGFTTDRKAFADSVGFVQMQNKKQAEKVNPRKKEAYAFEAVRPMTAADSIADYMAYVQSELMQEQNKKEEKVAEETRINFEKFVLQVFIKGFDSFLRAKEFDFVQMPQPQLTATASNQQKADKLNQLEASITADCKLTPQYAKADDATHIAFYVFCKLLDAAHLSNLRNELIKFRESVNEFKFHHLLEIIEICLLSADVVPTDYRDLYSSEADCLARLRPFIEQGADITNWSDLFVQSDKHSPVIHANIELSVKYGTTKLLEQIINKDTQFKTTEANFTAWNTAQKSIEQLIKQREDHHEQWVKAKNADDKEKQERKREKSNFAQKFIEKHGDDYLDICDYINTYNWLDNKMHFVHLNRLHGLTIELLGRMAGFVALFDRDFQFFDEQQIADEFKLHGFVNLHSIDKKLNEVPTKKIKEIYDIRNKIIQINGNKINESVRANLIQFISSKRNYYNNAFLHVSNDEIKEKQMYDIRNHIAHFNYLTKDAADFSLIDLINELRELLHYDRKLKNAVSKAFIDLFDKHGMILKLKLNADHKLKVESLEPKKIYHLGSSAKDKPEYQYCTNQVMMAYCNMCRSLLEMKK

SEQ ID NO: 137 - protein, 1182 aa, Leptotrichia wadei
MYMKITKIDGVSHYKKQDKGILKKKWKDLDERKQREKIEARYNKQIESKIYKEFFRLKNKKRIEKEEDQNIKSLYFFIKELYLNEKNEEWELKNINLEILDDKERVIKGYKFKEDVYFFKEGYKEYYLRILFNNLIEKVQNENREKVRKNKEFLDLKEIFKKYKNRKIDLLLKSINNNKINLEYKKENVNEEIYGINPTNDREMTFYELLKEIIEKKDEQKSILEEKLDNFDITNFLENIEKIFNEETEINIIKGKVLNELREYIKEKEENNSDNKLKQIYNLELKKYIENNFSYKKQKSKSKNGKNDYLYLNFLKKIMFIEEVDEKKEINKEKFKNKINSNFKNLFVQHILDYGKLLYYKENDEYIKNTGQLETKDLEYIKTKETLIRKMAVLVSFAANSYYNLFGRVSGDILGTEVVKSSKTNVIKVGSHIFKEKMLNYFFDFEIFDANKIVEILESISYSIYNVRNGVGHFNKLILGKYKKKDINTNKRIEEDLNNNEEIKGYFIKKRGEIERKVKEKFLSNNLQYYYSKEKIENYFEVYEFEILKRKIPFAPNFKRIIKKGEDLFNNKNNKKYEYFKNFDKNSAEEKKEFLKTRNFLLKELYYNNFYKEFLSKKEEFEKIVLEVKEEKKSRGNINNKKSGVSFQSIDDYDTKINISDYIASIHKKEMERVEKYNEEKQKDTAKYIRDFVEEIFLTGFINYLEKDKRLHFLKEEFSILCNNNNNVVDFNININEEKIKEFLKENDSKTLNLYLFFNMIDSKRISEFRNELVKYKQFTKKRLDEEKEFLGIKIELYETLIEFVILTREKLDTKKSEEIDAWLVDKLYVKDSNEYKEYEEILKLFVDEKILSSKEAPYYATDNKTPILLSNFEKTRKYGTQSFLSEIQSNYKYSKVEKENIEDYNKKEEIEQKKKSNIEKLQDLKVELHKKWEQNKITEKEIEKYNNTTRKINEYNYLKNKEELQNVYLLHEMLSDLLARNVAFFNKWERDFKFIVIAIKQFLRENDKEKVNEFLNPPDNSKGKKVYFSVSKYKNTVENIDGIHKNFMNLIFLNNKFMNRKIDKMNCAIWVYFRNYIAHFLHLHTKNEKISLISQMNLLIKLFSYDKKVQNHILKSTKTLLEKYNIQINFEISNDKNEVFKYKIKNRLYSKKGKMLGKNNKFEILENEFLENVKAMLEYSE

SEQ ID NO: 138 - protein, 1224 aa, Bergeyella zoohelcum
MENKTSLGNNIYYNPFKPQDKSYFAGYFNAAMENTDSVFRELGKRLKGKEYTSENFFDAIFKENISLVEYERYVKLLSDYFPMARLLDKKEVPIKERKENFKKNFKGIIKAVRDLRNFYTHKEHGEVEITDEIFGVLDEMLKSTVLTVKKKKVKTDKTKEILKKSIEKQLDILCQKKLEYLRDTARKIEEKRRNQRERGEKELVAPFKYSDKRDDLIAAIYNDAFDVYIDKKKDSLKESSKAKYNTKSDPQQEEGDLKIPISKNGVVFLLSLFLTKQEIHAFKSKIAGFKATVIDEATVSEATVSHGKNSICFMATHEIFSHLAYKKLKRKVRTAEINYGEAENAEQLSVYAKETLMMQMLDELSKVPDVVYQNLSEDVQKTFIEDWNEYLKENNGDVGTMEEEQVIHPVIRKRYEDKFNYFAIRFLDEFAQFPTLRFQVHLGNYLHDSRPKENLISDRRIKEKITVFGRLSELEHKKALFIKNTETNEDREHYWEIFPNPNYDFPKENISVNDKDFPIAGSILDREKQPVAGKIGIKVKLLNQQYVSEVDKAVKAHQLKQRKASKPSIQNIIEEIVPINESNPKEAIVFGGQPTAYLSMNDIHSILYEFFDKWEKKKEKLEKKGEKELRKEIGKELEKKIVGKIQAQIQQIIDKDTNAKILKPYQDGNSTAIDKEKLIKDLKQEQNILQKLKDEQTVREKEYNDFIAYQDKNREINKVRDRNHKQYLKDNLKRKYPEAPARKEVLYYREKGKVAVWLANDIKRFMPTDFKNEWKGEQHSLLQKSLAYYEQCKEELKNLLPEKVFQHLPFKLGGYFQQKYLYQFYTCYLDKRLEYISGLVQQAENFKSENKVFKKVENECFKFLKKQNYTHKELDARVQSILGYPIFLERGFMDEKPTIIKGKTFKGNEALFADWFRYYKEYQNFQTFYDTENYPLVELEKKQADRKRKTKIYQQKKNDVFTLLMAKHIFKSVFKQDSIDQFSLEDLYQSREERLGNQERARQTGERNTNYIWNKTVDLKLCDGKITVENVKLKNVGDFIKYEYDQRVQAFLKYEENIEWQAFLIKESKEEENYPYVVEREIEQYEKVRREELLKEVHLIEEYILEKVKDKEILKKGDNQNFKYYILNGLLKQLKNEDVESYKVFNLNTEPEDVNINQLKQEATDLEQKAFVLTYIRNKFAHNQLPKKEFWDYCQEKYGKIEKEKTYAEYFAEVFKKEKEALIK

SEQ ID NO: 139 - protein, 1126 aa, Prevotella intermedia
MEDDKKTTDSIRYELKDKHFWAAFLNLARHNVYITVNHINKILEEGEINRDGYETTLKNTWNEIKDINKKDRLSKLIIKHFPFLEAATYRLNPTDTTKQKEEKQAEAQSLESLRKSFFVFIYKLRDLRNHYSHYKHSKSLERPKFEEGLLEKMYNIFNASIRLVKEDYQYNKDINPDEDFKHLDRTEEEFNYYFTKDNEGNITESGLLFFVSLFLEKKDAIWMQQKLRGFKDNRENKKKMTNEVFCRSRMLLPKLRLQSTQTQDWILLDMLNELIRCPKSLYERLREEDREKFRVPIEIADEDYDAEQEPFKNTLVRHQDRFPYFALRYFDYNEIFTNLRFQIDLGTYHFSIYKKQIGDYKESHHLTHKLYGFERIQEFTKQNRPDEWRKFVKTFNSFETSKEPYIPETTPHYHLENQKIGIRFRNDNDKIWPSLKTNSEKNEKSKYKLDKSFQAEAFLSVHELLPMMFYYLLLKTENTDNDNEIETKKKENKNDKQEKHKIEEIIENKITEIYALYDTFANGEIKSIDELEEYCKGKDIEIGHLPKQMIAILKDEHKVMATEAERKQEEMLVDVQKSLESLDNQINEEIENVERKNSSLKSGKIASWLVNDMMRFQPVQKDNEGKPLNNSKANSTEYQLLQRTLAFFGSEHERLAPYFKQTKLIESSNPHPFLKDTEWEKCNNILSFYRSYLEAKKNFLESLKPEDWEKNQYFLKLKEPKTKPKTLVQGWKNGFNLPRGIFTEPIRKWFMKHRENITVAELKRVGLVAKVIPLFFSEEYKDSVQPFYNYHFNVGNINKPDEKNFLNCEERRELLRKKKDEFKKMTDKEKEENPSYLEFKSWNKFERELRLVRNQDIVTWLLCMELFNKKKIKELNVEKIYLKNINTNTTKKEKNTEEKNGEEKNIKEKNNILNRIMPMRLPIKVYGRENFSKNKKKKIRRNTFFTVYIEEKGTKLLKQGNFKALERDRRLGGLFSFVKTPSKAESKSNTISKLRVEYELGEYQKARIEIIKDMLALEKTLIDKYNSLDTDNFNKMLTDWLELKGEPDKASFQNDVDLLIAVRNAFSHNQYPMRNRIAFANINPFSLSSANTSEEKGLGIANQLKDKTHKTIEKIIEIEKPIETKE

SEQ ID NO: 140 - protein, 1127 aa, Prevotella buccae
MQKQDKLFVDRKKNAIFAFPKYITIMENKEKPEPIYYELTDKHFWAAFLNLARHNVYTTINHINRRLEIAELKDDGYMMGIKGSWNEQAKKLDKKVRLRDLIMKHFPFLEAAAYEMTNSKSPNNKEQREKEQSEALSLNNLKNVLFIFLEKLQVLRNYYSHYKYSEESPKPIFETSLLKNMYKVFDANVRLVKRDYMHHENIDMQRDFTHLNRKKQVGRTKNIIDSPNFHYHFADKEGNMTIAGLLFFVSLFLDKKDAIWMQKKLKGFKDGRNLREQMTNEVFCRSRISLPKLKLENVQTKDWMQLDMLNELVRCPKSLYERLREKDRESFKVPFDIFSDDYNAEEEPFKNTLVRHQDRFPYFVLRYFDLNEIFEQLRFQIDLGTYHFSIYNKRIGDEDEVRHLTHHLYGFARIQDFAPQNQPEEWRKLVKDLDHFETSQEPYISKTAPHYHLENEKIGIKFCSAHNNLFPSLQTDKTCNGRSKFNLGTQFTAEAFLSVHELLPMMFYYLLLTKDYSRKESADKVEGIIRKEISNIYAIYDAFANNEINSIADLTRRLQNTNILQGHLPKQMISILKGRQKDMGKEAERKIGEMIDDTQRRLDLLCKQTNQKIRIGKRNAGLLKSGKIADWLVNDMMRFQPVQKDQNNIPINNSKANSTEYRMLQRALALFGSENFRLKAYFNQMNLVGNDNPHPFLAETQWEHQTNILSFYRNYLEARKKYLKGLKPQNWKQYQHFLILKVQKTNRNTLVTGWKNSFNLPRGIFTQPIREWFEKHNNSKRIYDQILSFDRVGFVAKAIPLYFAEEYKDNVQPFYDYPFNIGNRLKPKKRQFLDKKERVELWQKNKELFKNYPSEKKKTDLAYLDFLSWKKFERELRLIKNQDIVTWLMFKELFNMATVEGLKIGEIHLRDIDTNTANEESNNILNRIMPMKLPVKTYETDNKGNILKERPLATFYIEETETKVLKQGNFKALVKDRRLNGLFSFAETTDLNLEEHPISKLSVDLELIKYQTTRISIFEMTLGLEKKLIDKYSTLPTDSFRNMLERWLQCKANRPELKNYVNSLIAVRNAFSHNQYPMYDATLFAEVKKFTLFPSVDTKKIELNIAPQLLEIVGKAIKEIEKSENKN

SEQ ID NO: 141 - protein, 1135 aa, Porphyromonas gingivalis
MNTVPASENKGQSRTVEDDPQYFGLYLNLARENLIEVESHVRIKFGKKKLNEESLKQSLLCDHLLSVDRWTKVYGHSRRYLPFLHYFDPDSQIEKDHDSKTGVDPDSAQRLIRELYSLLDFLRNDFSHNRLDGTTFEHLEVSPDISSFITGTYSLACGRAQSRFAVFFKPDDFVLAKNRKEQLISVADGKECLTVSGFAFFICLFLDREQASGMLSRIRGFKRTDENWARAVHETFCDLCIRHPHDRLESSNTKEALLLDMLNELNRCPRILYDMLPEEERAQFLPALDENSMNNLSENSLDEESRLLWDGSSDWAEALTKRIRHQDRFPYLMLRFIEEMDLLKGIRFRVDLGEIELDSYSKKVGRNGEYDRTITDHALAFGKLSDFQNEEEVSRMISGEASYPVRFSLFAPRYAIYDNKIGYCHTSDPVYPKSKTGEKRALSNPQSMGFISVHDLRKLLLMELLCEGSFSRMQSDFLRKANRILDETAEGKLQFSALFPEMRHRFIPPQNPKSKDRREKAETTLEKYKQEIKGRKDKLNSQLLSAFDMDQRQLPSRLLDEWMNIRPASHSVKLRTYVKQLNEDCRLRLRKFRKDGDGKARAIPLVGEMATFLSQDIVRMIISEETKKLITSAYYNEMQRSLAQYAGEENRRQFRAIVAELRLLDPSSGHPFLSATMETAHRYTEGFYKCYLEKKREWLAKIFYRPEQDENTKRRISVFFVPDGEARKLLPLLIRRRMKEQNDLQDWIRNKQAHPIDLPSHLFDSKVMELLKVKDGKKKWNEAFKDWWSTKYPDGMQPFYGLRRELNIHGKSVSYIPSDGKKFADCYTHLMEKTVRDKKRELRTAGKPVPPDLAADIKRSFHRAVNEREFMLRLVQEDDRLMLMAINKMMTDREEDILPGLKNIDSILDEENQFSLAVHAKVLEKEGEGGDNSLSLVPATIEIKSKRKDWSKYIRYRYDRRVPGLMSHFPEHKATLDEVKTLLGEYDRCRIKIFDWAFALEGAIMSDRDLKPYLHESSSREGKSGEHSTLVKMLVEKKGCLTPDESQYLILIRNKAAHNQFPCAAEMPLIYRDVSAKVGSIEGSSAKDLPEGSSLVDSLWKKYEMIIRKILPILDPENRFFGKLLNNMSQPINDL

SEQ ID NO: 142 - protein, 1115 aa, Bacteroides pyogenes
MESIKNSQKSTGKTLQKDPPYFGLYLNMALLNVRKVENHIRKWLGDVALLPEKSGFHSLLTTDNLSSAKWTRFYYKSRKFLPFLEMFDSDKKSYENRRETAECLDTIDRQKISSLLKEVYGKLQDIRNAFSHYHIDDQSVKHTALIISSEMHRFIENAYSFALQKTRARFTGVFVETDFLQAEEKGDNKKFFAIGGNEGIKLKDNALIFLICLFLDREEAFKFLSRATGFKSTKEKGFLAVRETFCALCCRQPHERLLSVNPREALLMDMLNELNRCPDILFEMLDEKDQKSFLPLLGEEEQAHILENSLNDELCEAIDDPFEMIASLSKRVRYKNRFPYLMLRYIEEKNLLPFIRFRIDLGCLELASYPKKMGEENNYERSVTDHAMAFGRLTDFHNEDAVLQQITKGITDEVRFSLYAPRYAIYNNKIGFVRTSGSDKISFPTLKKKGGEGHCVAYTLQNTKSFGFISIYDLRKILLLSFLDKDKAKNIVSGLLEQCEKHWKDLSENLFDAIRTELQKEFPVPLIRYTLPRSKGGKLVSSKLADKQEKYESEFERRKEKLTEILSEKDFDLSQIPRRMIDEWLNVLPTSREKKLKGYVETLKLDCRERLRVFEKREKGEHPLPPRIGEMATDLAKDIIRMVIDQGVKQRITSAYYSEIQRCLAQYAGDDNRRHLDSIIRELRLKDTKNGHPFLGKVLRPGLGHTEKLYQRYFEEKKEWLEATFYPAASPKRVPRFVNPPTGKQKELPLIIRNLMKERPEWRDWKQRKNSHPIDLPSQLFENEICRLLKDKIGKEPSGKLKWNEMFKLYWDKEFPNGMQRFYRCKRRVEVFDKVVEYEYSEEGGNYKKYYEALIDEVVRQKISSSKEKSKLQVEDLTLSVRRVFKRAINEKEYQLRLLCEDDRLLFMAVRDLYDWKEAQLDLDKIDNMLGEPVSVSQVIQLEGGQPDAVIKAECKLKDVSKLMRYCYDGRVKGLMPYFANHEATQEQVEMELRHYEDHRRRVFNWVFALEKSVLKNEKLRRFYEESQGGCEHRRCIDALRKASLVSEEEYEFLVHIRNKSAHNQFPDLEIGKLPPNVTSGFCECIWSKYKAIICRIIPFIDPERRFFGKLLEQK

SEQ ID NO: 143 - protein, 668 aa, Unknown
  source: /note="Description of Unknown: Cas13c sequence"
MTEKKSIIFKNKSSVEIVKKDIFSQTPDNMIRNYKITLKISEKNPRVVEAEIEDLMNSTILKDGRRSARREKSMTERKLIEEKVAENYSLLANCPMEEVDSIKIYKIKRFLTYRSNMLLYFASINSFLCEGIKGKDNETEEIWHLKDNDVRKEKVKENFKNKLIQSTENYNSSLKNQIEEKEKLLRKESKKGAFYRTIIKKLQQERIKELSEKSLTEDCEKIIKLYSELRHPLMHYDYQYFENLFENKENSELTKNLNLDIFKSLPLVRKMKLNNKVNYLEDNDTLFVLQKTKKAKTLYQIYDALCEQKNGFNKFINDFFVSDGEENTVFKQIINEKFQSEMEFLEKRISESEKKNEKLKKKFDSMKAHFHNINSEDTKEAYFWDIHSSSNYKTKYNERKNLVNEYTELLGSSKEKKLLREEITQINRKLLKLKQEMEEITKKNSLFRLEYKMKIAFGFLFCEFDGNISKFKDEFDASNQEKIIQYHKNGEKYLTYFLKEEEKEKFNLEKMQKIIQKTEEEDWLLPETKNNLFKFYLLTYLLLPYELKGDFLGFVKKHYYDIKNVDFMDENQNNIQVSQTVEKQEDYFYHKIRLFEKNTKKYEIVKYSIVPNEKLKQYFEDLGIDIKYLTGSVESGEKWLGENLGIDIKYLTVEQKSEVSEEKIKKFL

SEQ ID NO: 144 - protein, 796 aa, Unknown
  source: /note="Description of Unknown: Cas13c sequence"
MEKDKKGEKIDISQEMIEEDLRKILILFSRLRHSMVHYDYEFYQALYSGKDFVISDKNNLENRMISQLLDLNIFKELSKVKLIKDKAISNYLDKNTTIHVLGQDIKAIRLLDIYRDICGSKNGFNKFINTMITISGEEDREYKEKVIEHFNKKMENLSTYLEKLEKQDNAKRNNKRVYNLLKQKLIEQQKLKEWFGGPYVYDIHSSKRYKELYIERKKLVDRHSKLFEEGLDEKNKKELTKINDELSKLNSEMKEMTKLNSKYRLQYKLQLAFGFILEEFDLNIDTFINNFDKDKDLIISNFMKKRDIYLNRVLDRGDNRLKNIIKEYKFRDTEDIFCNDRDNNLVKLYILMYILLPVEIRGDFLGFVKKNYYDMKHVDFIDKKDKEDKDTFFHDLRLFEKNIRKLEITDYSLSSGFLSKEHKVDIEKKINDFINRNGAMKLPEDITIEEFNKSLILPIMKNYQINFKLLNDIEISALFKIAKDRSITFKQAIDEIKNEDIKKNSKKNDKNNHKDKNINFTQLMKRALHEKIPYKAGMYQIRNNISHIDMEQLYIDPLNSYMNSNKNNITISEQIEKIIDVCVTGGVTGKELNNNIINDYYMKKEKLVFNLKLRKQNDIVSIESQEKNKREEFVFKKYGLDYKDGEINIIEVIQKVNSLQEELRNIKETSKEKLKNKETLFRDISLINGTIRKNINFKIKEMVLDIVRMDEIRHINIHIYYKGENYTRSNIIKFKYAIDGENKKYYLKQHEINDINLELKDKFVTLICNMDKHPNKNKQTINLESNYIQNVKFIIP

SEQ ID NO: 145 - protein, 897 aa, Unknown
  source: /note="Description of Unknown: Cas13c sequence"
MENKGNNKKIDFDENYNILVAQIKEYFTKEIENYNNRIDNIIDKKELLKYSEKKEESEKNKKLEELNKLKSQKLKILTDEEIKADVIKIIKIFSDLRHSLMHYEYKYFENLFENKKNEELAELLNLNLFKNLTLLRQMKIENKTNYLEGREEFNIIGKNIKAKEVLGHYNLLAEQKNGFNNFINSFFVQDGTENLEFKKLIDEHFVNAKKRLERNIKKSKKLEKELEKMEQHYQRLNCAYVWDIHTSTTYKKLYNKRKSLIEEYNKQINEIKDKEVITAINVELLRIKKEMEEITKSNSLFRLKYKMQIAYAFLEIEFGGNIAKFKDEFDCSKMEEVQKYLKKGVKYLKYYKDKEAQKNYEFPFEEIFENKDTHNEEWLENTSENNLFKFYILTYLLLPMEFKGDFLGVVKKHYYDIKNVDFTDESEKELSQVQLDKMIGDSFFHKIRLFEKNTKRYEIIKYSILTSDEIKRYFRLLELDVPYFEYEKGTDEIGIFNKNIILTIFKYYQIIFRLYNDLEIHGLFNISSDLDKILRDLKSYGNKNINFREFLYVIKQNNNSSTEEEYRKIWENLEAKYLRLHLLTPEKEEIKTKTKEELEKLNEISNLRNGICHLNYKEIIEEILKTEISEKNKEATLNEKIRKVINFIKENELDKVELGFNFINDFFMKKEQFMFGQIKQVKEGNSDSITTERERKEKNNKKLKETYELNCDNLSEFYETSNNLRERANSSSLLEDSAFLKKIGLYKVKNNKVNSKVKDEEKRIENIKRKLLKDSSDIMGMYKAEVVKKLKEKLILIFKHDEEKRIYVTVYDTSKAVPENISKEILVKRNNSKEEYFFEDNNKKYVTEYYTLEITETNELKVIPAKKLEGKEFKTEKNKENKLMLNNHYCFNVKIIY

SEQ ID NO: 146 - protein, 919 aa, Unknown
  source: /note="Description of Unknown: Cas13c sequence"
MEEIKHKKNKSSIIRVIVSNYDMTGIKEIKVLYQKQGGVDTFNLKTIINLESGNLEIISCKPKEREKYRYEFNCKTEINTISITKKDKVLKKEIRKYSLELYFKNEKKDTVVAKVTDLLKAPDKIEGERNHLRKLSSSTERKLLSKTLCKNYSEISKTPIEEIDSIKIYKIKRFLNYRSNFLIYFALINDFLCAGVKEDDINEVWLIQDKEHTAFLENRIEKITDYIFDKLSKDIENKKNQFEKRIKKYKTSLEELKTETLEKNKTFYIDSIKTKITNLENKITELSLYNSKESLKEDLIKIISIFTNLRHSLMHYDYKSFENLFENIENEELKNLLDLNLFKSIRMSDEFKTKNRTNYLDGTESFTIVKKHQNLKKLYTYYNNLCDKKNGFNTFINSFFVTDGIENTDFKNLIILHFEKEMEEYKKSIEYYKIKISNEKNKSKKEKLKEKIDLLQSELINMREHKNLLKQIYFFDIHNSIKYKELYSERKNLIEQYNLQINGVKDVTAINHINTKLLSLKNKMDKITKQNSLYRLKYKLKIAYSFLMIEFDGDVSKFKNNFDPTNLEKRVEYLDKKEEYLNYTAPKNKFNFAKLEEELQKIQSTSEMGADYLNVSPENNLFKFYILTYIMLPVEFKGDFLGFVKNHYYNIKNVDFMDESLLDENEVDSNKLNEKIENLKDSSFFNKIRLFEKNIKKYEIVKYSVSTQENMKEYFKQLNLDIPYLDYKSTDEIGIFNKNMILPIFKYYQNVFKLCNDIEIHALLALANKKQQNLEYAIYCCSKKNSLNYNELLKTFNRKTYQNLSFIRNKIAHLNYKELFSDLFNNELDLNTKVRCLIEFSQNNKFDQIDLGMNFINDYYMKKTRFIFNQRRLRDLNVPSKEKIIDGKRKQQNDSNNELLKKYGLSRTNIKDIFNKAWY

SEQ ID NO: 147 - protein, 1110 aa, Unknown
  source: /note="Description of Unknown: Cas13c sequence"
MKVRYRKQAQLDTFIIKTEIVNNDIFIKSIIEKAREKYRYSFLFDGEEKYHFKNKSSVEIVKNDIFSQTPDNMIRNYKITLKISEKNPRVVEAEIEDLMNSTILKDGRRSARREKSMTERKLIEEKVAENYSLLANCPIEEVDSIKIYKIKRFLTYRSNMLLYFASINSFLCEGIKGKDNETEEIWHLKDNDVRKEKVKENFKNKLIQSTENYNSSLKNQIEEKEKLSSKEFKKGAFYRTIIKKLQQERIKELSEKSLTEDCEKIIKLYSELRHPLMHYDYQYFENLFENKENSELTKNLNLDIFKSLPLVRKMKLNNKVNYLEDNDTLFVLQKTKKAKTLYQIYDALCEQKNGFNKFINDFFVSDGEENTVFKQIINEKFQSEMEFLEKRISESEKKNEKLKKKLDSMKAHFRNINSEDTKEAYFWDIHSSRNYKTKYNERKNLVNEYTKLLGSSKEKKLLREEITKINRQLLKLKQEMEEITKKNSLFRLEYKMKIAFGFLFCEFDGNISKFKDEFDASNQEKIIQYHKNGEKYLTSFLKEEEKEKFNLEKMQKIIQKTEEEDWLLPETKNNLFKFYLLTYLLLPYELKGDFLGFVKKHYYDIKNVDFMDENQNNIQVSQTVEKQEDYFYHKIRLFEKNTKKYEIVKYSIVPNEKLKQYFEDLGIDIKYLTGSVESGEKWLGENLGIDIKYLTVEQKSEVSEEKNKKVSLKNNGMFNKTILLFVFKYYQIAFKLFNDIELYSLFFLREKSEKPFEVFLEELKDKMIGKQLNFGQLLYVVYEVLVKNKDLDKILSKKIDYRKDKSFSPEIAYLRNFLSHLNYSKFLDNFMKINTNKSDENKEVLIPSIKIQKMIQFIEKCNLQNQIDFDFNFVNDFYMRKEKMFFIQLKQIFPDINSTEKQKKSEKEEILRKRYHLINKKNEQIKDEHEAQSQLYEKILSLQKIFSCDKNNFYRRLKEEKLLFLEKQGKKKISMKEIKDKIASDISDLLGILKKEITRDIKDKLTEKFRYCEEKLLNISFYNHQDKKKEEGIRVFLIRDKNSDNFKFESILDDGSNKIFISKNGKEITIQCCDKVLETLMIEKNTLKISSNGKIISLIPHYSYSIDVKY

SEQ ID NO: 148 - DNA, 18 bp, Artificial Sequence
  source: /note="Description of Artificial Sequence: Synthetic primer"
tggaacaagttgtggagg

SEQ ID NO: 149 - DNA, 22 bp, Artificial Sequence
  source: /note="Description of Artificial Sequence: Synthetic primer"
tgcagcatcatatagatcttga

SEQ ID NO: 150 - DNA, 49 bp, Artificial Sequence
  source: /note="Description of Artificial Sequence: Synthetic primer"
tagtgatgcttttgggttgttcaattgtatgagtatgctcaaaaattgg

SEQ ID NO: 151 - DNA, 40 bp, Artificial Sequence
  source: /note="Description of Artificial Sequence: Synthetic primer"
gtgtagtattgggcaatgctgctccttggtgtacctctgt

SEQ ID NO: 152 - DNA, 22 bp, Artificial Sequence
  source: /note="Description of Artificial Sequence: Synthetic primer"
tatggtagaatcctgcttctcc

SEQ ID NO: 153 - DNA, 21 bp, Artificial Sequence
  source: /note="Description of Artificial Sequence: Synthetic primer"
tggcctaggcataatgggaga

SEQ ID NO: 154 - DNA, 19 bp, Artificial Sequence
  source: /note="Description of Artificial Sequence: Synthetic primer"
aacaagttgtggaggtgta

SEQ ID NO: 155 - DNA, 22 bp, Artificial Sequence
  source: /note="Description of Artificial Sequence: Synthetic primer"
ccattttctttgagttgttcag

SEQ ID NO: 156 - DNA, 46 bp, Artificial Sequence
  source: /note="Description of Artificial Sequence: Synthetic primer"
tagtgatgcttttgggttgttcaagagtatgctcaaaaattgggtg

SEQ ID NO: 157 - DNA, 44 bp, Artificial Sequence
  source: /note="Description of Artificial Sequence: Synthetic primer"
gtattgggcaatgctgctggcatatagatcttgattccttggtg

SEQ ID NO: 158 - DNA, 22 bp, Artificial Sequence
  source: /note="Description of Artificial Sequence: Synthetic primer"
atatggtagaatcctgcttctc

SEQ ID NO: 159 - DNA, 22 bp, Artificial Sequence
  source: /note="Description of Artificial Sequence: Synthetic primer"
cctaggcataatgggagaatac

SEQ ID NO: 160 - DNA, 45 bp, Artificial Sequence
  source: /note="Description of Artificial Sequence: Synthetic primer"
atagtgatgcttttgggttgttcaagtatgctcaaaaattgggtg

SEQ ID NO: 161 - DNA, 44 bp, Artificial Sequence
  source: /note="Description of Artificial Sequence: Synthetic primer"
gctgctggcctaggcataatgcatcatatagatcttgattcctt

SEQ ID NO: 162 - DNA, 20 bp, Artificial Sequence
  source: /note="Description of Artificial Sequence: Synthetic primer"
gggagaatacagaggtacac

SEQ ID NO: 163 - DNA, 20 bp, Artificial Sequence
  source: /note="Description of Artificial Sequence: Synthetic primer"
gggtcttagcaaaatcagtt

SEQ ID NO: 164 - DNA, 42 bp, Artificial Sequence
  source: /note="Description of Artificial Sequence: Synthetic primer"
gaatcctgcttctccacccaattgacacgctagtgtacaagc

SEQ ID NO: 165 - DNA, 23 bp, Artificial Sequence
  source: /note="Description of Artificial Sequence: Synthetic primer"
cctccacaacttgttccatttct

SEQ ID NO: 166 - DNA, 20 bp, Artificial Sequence
  source: /note="Description of Artificial Sequence: Synthetic primer"
tggcctaggcataatgggag

SEQ ID NO: 167 - DNA, 20 bp, Artificial Sequence
  source: /note="Description of Artificial Sequence: Synthetic primer"
aagcagaaatggaacaagtt

SEQ ID NO: 168 - DNA, 43 bp, Artificial Sequence
  source: /note="Description of Artificial Sequence: Synthetic primer"
tagtgatgcttttgggttgttcagtggaggtgtatgagtatgc

SEQ ID NO: 169 - DNA, 45 bp, Artificial Sequence
  source: /note="Description of Artificial Sequence: Synthetic primer"
gtagtattgggcaatgctgctgatatagatcttgattccttggtg

SEQ ID NO: 170 - DNA, 22 bp, Artificial Sequence
  source: /note="Description of Artificial Sequence: Synthetic primer"
tgcttctccacccaatttttga

SEQ ID NO: 171 - DNA, 23 bp, Artificial Sequence
  source: /note="Description of Artificial Sequence: Synthetic primer"
gcctaggcataatgggagaatac

SEQ ID NO: 172 - DNA, 39 bp, Artificial Sequence
  source: /note="Description of Artificial Sequence: Synthetic primer"
gaatcctgcttctccacccagacacgctagtgtacaagc

SEQ ID NO: 173 - DNA, 18 bp, Artificial Sequence
  source: /note="Description of Artificial Sequence: Synthetic primer"
tacacagctgctgttcaa

SEQ ID NO: 174 - DNA, 19 bp, Artificial Sequence
  source: /note="Description of Artificial Sequence: Synthetic primer"
ggtaaatttgctgggcatt

SEQ ID NO: 175 - DNA, 42 bp, Artificial Sequence
  source: /note="Description of Artificial Sequence: Synthetic primer"
ttggaacatgggcacccataaatgtcctagaaaaagacgatg

SEQ ID NO: 176 - DNA, 44 bp, Artificial Sequence
  source: /note="Description of Artificial Sequence: Synthetic primer"
ctagtgaaacaaatatccacacccagcactgcacttcttgagtt

SEQ ID NO: 177 - DNA, 18 bp, Artificial Sequence
  source: /note="Description of Artificial Sequence: Synthetic primer"
ttgtaagtgatgcaggat

SEQ ID NO: 178 - DNA, 23 bp, Artificial Sequence
  source: /note="Description of Artificial Sequence: Synthetic primer"
agggaccctcattaagagtcatg

SEQ ID NO: 179 - DNA, 18 bp, Artificial Sequence
  source: /note="Description of Artificial Sequence: Synthetic primer"
atacacagctgctgttca

SEQ ID NO: 180 - DNA, 42 bp, Artificial Sequence
  source: /note="Description of Artificial Sequence: Synthetic primer"
tctgctggcatggatgattgaatgtcctagaaaaagacgatg

SEQ ID NO: 181 - DNA, 24 bp, Artificial Sequence
  source: /note="Description of Artificial Sequence: Synthetic primer"
cccatattgtaagtgatgcaggat

SEQ ID NO: 182 - DNA, 22 bp, Artificial Sequence
  source: /note="Description of Artificial Sequence: Synthetic primer"
agggaccctcattaagagtcat

SEQ ID NO: 183 - DNA, 19 bp, Artificial Sequence
  source: /note="Description of Artificial Sequence: Synthetic primer"
tggtaaatttgctgggcat

SEQ ID NO: 184 - DNA, 43 bp, Artificial Sequence
  source: /note="Description of Artificial Sequence: Synthetic primer"
tgaaacaaatatccacacccaagggcactgcacttcttgagtt

SEQ ID NO: 185 - DNA, 23 bp, Artificial Sequence
  source: /note="Description of Artificial Sequence: Synthetic primer"
ccatattgtaagtgatgcaggat

SEQ ID NO: 186 - DNA, 22 bp, Artificial Sequence
  source: /note="Description of Artificial Sequence: Synthetic primer"
gaccctcattaagagtcatgat

SEQ ID NO: 187 - DNA, 21 bp, Artificial Sequence
  source: /note="Description of Artificial Sequence: Synthetic primer"
aacatacgtgaacaaacttca

SEQ ID NO: 188 - DNA, 22 bp, Artificial Sequence
  source: /note="Description of Artificial Sequence: Synthetic primer"
gcacatatggtaaatttgctgg

SEQ ID NO: 189 - DNA, 43 bp, Artificial Sequence
  source: /note="Description of Artificial Sequence: Synthetic primer"
acccatattgtaagtgatgcaggatagggctccacatacacag

SEQ ID NO: 190 - DNA, 43 bp, Artificial Sequence
  source: /note="Description of Artificial Sequence: Synthetic primer"
ctagtgaaacaaatatccacacccaagcactgcacttcttgag

SEQ ID NO: 191 - DNA, 25 bp, Artificial Sequence
  source: /note="Description of Artificial Sequence: Synthetic primer"
tttctaggacattgtattgaacagc

SEQ ID NO: 192 - DNA, 22 bp, Artificial Sequence
  source: /note="Description of Artificial Sequence: Synthetic primer"
gggaccctcattaagagtcatg

SEQ ID NO: 193 - DNA, 19 bp, Artificial Sequence
  source: /note="Description of Artificial Sequence: Synthetic primer"
gacttgaagatgtctttgc

SEQ ID NO: 194 - DNA, 19 bp, Artificial Sequence
  source: /note="Description of Artificial Sequence: Synthetic primer"
tgttgtttgggtccccatt

SEQ ID NO: 195 - DNA, 39 bp, Artificial Sequence
  source: /note="Description of Artificial Sequence: Synthetic primer"
ttagtcagaggtgacaggattgcagatcttgaggctctc

SEQ ID NO: 196 - DNA, 39 bp, Artificial Sequence
  source: /note="Description of Artificial Sequence: Synthetic primer"
ttgtgttcacgctcaccgtgtttggacaaagcgtctacg

SEQ ID NO: 197 - DNA, 16 bp, Artificial Sequence
  source: /note="Description of Artificial Sequence: Synthetic primer"
gtcttgtctttagcca

SEQ ID NO: 198 - DNA, 16 bp, Artificial Sequence
  source: /note="Description of Artificial Sequence: Synthetic primer"
cagtgagcgaggactg

SEQ ID NO: 199 - DNA, 16 bp, Artificial Sequence
  source: /note="Description of Artificial Sequence: Synthetic primer"
accgaggtcgaaacgt

SEQ ID NO: 200 - DNA, 17 bp, Artificial Sequence
  source: /note="Description of Artificial Sequence: Synthetic primer"
ggtccccattcccattg

SEQ ID NO: 201 - DNA, 48 bp, Artificial Sequence
  source: /note="Description of Artificial Sequence: Synthetic primer"
caaagacatcttcaagtctctgcgttttttctctctatcgtcccgtca

SEQ ID NO: 202 - DNA, 46 bp, Artificial Sequence
  source: /note="Description of Artificial Sequence: Synthetic primer"
aatggctaaagacaagaccaatccttttttgtctacgctgcagtcc

SEQ ID NO: 203 - DNA, 18 bp, Artificial Sequence
  source: /note="Description of Artificial Sequence: Synthetic primer"
cgatctcggctttgaggg

SEQ ID NO: 204 - DNA, 17 bp, Artificial Sequence
  source: /note="Description of Artificial Sequence: Synthetic primer"
tcaccgtgcccagtgag

SEQ ID NO: 205 - DNA, 23 bp, Artificial Sequence
  source: /note="Description of Artificial Sequence: Synthetic primer"
cgaaagcaggtagatattgaaag

SEQ ID NO: 206 - DNA, 17 bp, Artificial Sequence
  source: /note="Description of Artificial Sequence: Synthetic primer"
tctacgctgcagtcctc

SEQ ID NO: 207 - DNA, 44 bp, Artificial Sequence
  source: /note="Description of Artificial Sequence: Synthetic primer"
tcaagtctctgcgcgatctcttttttgagtcttctaaccgaggt

SEQ ID NO: 208 - DNA, 53 bp, Artificial Sequence
  source: /note="Description of Artificial Sequence: Synthetic primer"
agatgtctttgcagggaaaaacacttttttcacaaatcctaaaatccccttag

SEQ ID NO: 209 - DNA, 24 bp, Artificial Sequence
  source: /note="Description of Artificial Sequence: Synthetic primer"
gacgatagagagaacgtacgtttc

SEQ ID NO: 210 - DNA, 21 bp, Artificial Sequence
  source: /note="Description of Artificial Sequence: Synthetic primer"
aagaccaatcctgtcacctct

SEQ ID NO: 211 - DNA, 21 bp, Artificial Sequence
  source: /note="Description of Artificial Sequence: Synthetic primer"
gcgaaagcaggtagatattga

SEQ ID NO: 212 - DNA, 19 bp, Artificial Sequence
  source: /note="Description of Artificial Sequence: Synthetic primer"
cattcccattgagggcatt

SEQ ID NO: 213 - DNA, 41 bp, Artificial Sequence
  source: /note="Description of Artificial Sequence: Synthetic primer"
cttcaagtctctgcgcgatctatgagtcttctaaccgaggt

SEQ ID NO: 214 - DNA, 41 bp, Artificial Sequence
  source: /note="Description of Artificial Sequence: Synthetic primer"
ttgaggctctcatggaatggcagcgtgaacacaaatcctaa

SEQ ID NO: 215 - DNA, 20 bp, Artificial Sequence
  source: /note="Description of Artificial Sequence: Synthetic primer"
tgacgggacgatagagagaa

SEQ ID NO: 216 - DNA, 20 bp, Artificial Sequence
  source: /note="Description of Artificial Sequence: Synthetic primer"
acaagaccaatcctgtcacc

SEQ ID NO: 217 - DNA, 41 bp, Artificial Sequence
  source: /note="Description of Artificial Sequence: Synthetic primer"
ttcaagtctctgcgcgatctcatgagtcttctaaccgaggt

SEQ ID NO: 218 - DNA, 18 bp, Artificial Sequence
  source: /note="Description of Artificial Sequence: Synthetic primer"
ttggacaaagcgtctacg

SEQ ID NO: 219 - DNA, 39 bp, Artificial Sequence
  source: /note="Description of Artificial Sequence: Synthetic primer"
aagtctctgcgcgatctcgatgagtcttctaaccgaggt

SEQ ID NO: 220 - DNA, 19 bp, Artificial Sequence
  source: /note="Description of Artificial Sequence: Synthetic primer"
tcttctaaccgaggtcgaa

SEQ ID NO: 221 - DNA, 19 bp, Artificial Sequence
  source: /note="Description of Artificial Sequence: Synthetic primer"
ctgctctgtccatgttgtt

SEQ ID NO: 222 - DNA, 42 bp, Artificial Sequence
  source: /note="Description of Artificial Sequence: Synthetic primer"
tcagaggtgacaggattggtctgaagatgtctttgcagggaa

SEQ ID NO: 223 - DNA, 38 bp, Artificial Sequence
  source: /note="Description of Artificial Sequence: Synthetic primer"
ttgtgttcacgctcaccgtcattcccattgagggcatt

SEQ ID NO: 224 - DNA, 22 bp, Artificial Sequence
  source: /note="Description of Artificial Sequence: Synthetic primer"
attccatgagagcctcaagatc

SEQ ID NO: 225 - DNA, 18 bp, Artificial Sequence
  source: /note="Description of Artificial Sequence: Synthetic primer"
gaggactgcagcgtagac

SEQ ID NO: 226 - DNA, 19 bp, Artificial Sequence
  source: /note="Description of Artificial Sequence: Synthetic primer"
ttctctctatcgtcccgtc

SEQ ID NO: 227 - DNA, 41 bp, Artificial Sequence
  source: /note="Description of Artificial Sequence: Synthetic primer"
cccttagtcagaggtgacaggaacacagatcttgaggctct

SEQ ID NO: 228 - DNA, 22 bp, Artificial Sequence
  source: /note="Description of Artificial Sequence: Synthetic primer"
ggtcttgtctttagccattcca

SEQ ID NO: 229 - DNA, 19 bp, Artificial Sequence
  source: /note="Description of Artificial Sequence: Synthetic primer"
gtcttctaaccgaggtcga

SEQ ID NO: 230 - DNA, 41 bp, Artificial Sequence
  source: /note="Description of Artificial Sequence: Synthetic primer"
gaggtgacaggattggtcttgttgaagatgtctttgcaggg

SEQ ID NO: 231 - DNA, 20 bp, Artificial Sequence
  source: /note="Description of Artificial Sequence: Synthetic primer"
aagaagacaagagatatggc

SEQ ID NO: 232 - DNA, 22 bp, Artificial Sequence
  source: /note="Description of Artificial Sequence: Synthetic primer"
caattcgacactaattgatggc

SEQ ID NO: 233 - DNA, 39 bp, Artificial Sequence
  source: /note="Description of Artificial Sequence: Synthetic primer"
gtctccttgcccaattagcaagcatcaatgaactgagca

SEQ ID NO: 234 - DNA, 40 bp, Artificial Sequence
  source: /note="Description of Artificial Sequence: Synthetic primer"
gtggtgttggtaatgaaacgaagctgtctggctgtcagta

SEQ ID NO: 235 - DNA, 20 bp, Artificial Sequence
  source: /note="Description of Artificial Sequence: Synthetic primer"
acattagccttctctccttt

SEQ ID NO: 236 - DNA, 19 bp, Artificial Sequence
  source: /note="Description of Artificial Sequence: Synthetic primer"
aacgggactctagcatact

SEQ ID NO: 237 - DNA, 20 bp, Artificial Sequence
  source: /note="Description of Artificial Sequence: Synthetic primer"
agggacatgaacaacaaaga

SEQ ID NO: 238 - DNA, 19 bp, Artificial Sequence
  source: /note="Description of Artificial Sequence: Synthetic primer"
caagtttagcaacaagcct

SEQ ID NO: 239 - DNA, 49 bp, Artificial Sequence
  source: /note="Description of Artificial Sequence: Synthetic primer"
tcagggacaatacattacgcatatcgataaaggaggaagtaaacactca

SEQ ID NO: 240 - DNA, 43 bp, Artificial Sequence
  source: /note="Description of Artificial Sequence: Synthetic primer"
taaacggaacattcctcaaacaccactctggtcatatgcattc

SEQ ID NO: 241 - DNA, 23 bp, Artificial Sequence
  source: /note="Description of Artificial Sequence: Synthetic primer"
tcaaacggaacttcccttctttc

SEQ ID NO: 242 - DNA, 25 bp, Artificial Sequence
  source: /note="Description of Artificial Sequence: Synthetic primer"
ggatacaagtccttatcaactctgc

SEQ ID NO: 243 - DNA, 22 bp, Artificial Sequence
  source: /note="Description of Artificial Sequence: Synthetic primer"
cttgtaatcaacatcagggtaa

SEQ ID NO: 244 - DNA, 21 bp, Artificial Sequence
  source: /note="Description of Artificial Sequence: Synthetic primer"
agaaacgacaagtagaccatt

SEQ ID NO: 245 - DNA, 43 bp, Artificial Sequence
  source: /note="Description of Artificial Sequence: Synthetic primer"
cgcctcttggatcagacacatgtgttaatacaaaggtacagga

SEQ ID NO: 246 - DNA, 45 bp, Artificial Sequence
  source: /note="Description of Artificial Sequence: Synthetic primer"
cacgctatcatcatcaggggctgcttcaagtgtatataaactcac

SEQ ID NO: 247 - DNA, 23 bp, Artificial Sequence
  source: /note="Description of Artificial Sequence: Synthetic primer"
gagagccatgaagaacaaattct

SEQ ID NO: 248 - DNA, 23 bp, Artificial Sequence
  source: /note="Description of Artificial Sequence: Synthetic primer"
cgaggcttctctttgtttttaat

SEQ ID NO: 249 - RNA, 41 nt, Artificial Sequence
  source: /note="Description of Artificial Sequence: Synthetic oligonucleotide"
uaauuucuacuaaguguagaucuuauaaaagaacuagccaa

SEQ ID NO: 250 - RNA, 41 nt, Artificial Sequence
  source: /note="Description of Artificial Sequence: Synthetic oligonucleotide"
uaauuucuacuaaguguagauacucaauuuccucacuucuc

SEQ ID NO: 251 - RNA, 41 nt, Artificial Sequence
  source: /note="Description of Artificial Sequence: Synthetic oligonucleotide"
uaauuucuacuaaguguagauuguucacgcucaccgugccc

SEQ ID NO: 252 - RNA, 41 nt, Artificial Sequence
  source: /note="Description of Artificial Sequence: Synthetic oligonucleotide"
uaauuucuacuaaguguagaugccauuccaugagagccuca

SEQ ID NO: 253 - RNA, 41 nt, Artificial Sequence
  source: /note="Description of Artificial Sequence: Synthetic oligonucleotide"
uaauuucuacuaaguguagaugacaaagcgucuacgcugca

SEQ ID NO: 254 - RNA, 41 nt, Artificial Sequence
  source: /note="Description of Artificial Sequence: Synthetic oligonucleotide"
uaauuucuacuaaguguagaucuaacacucucagggacaau

SEQ ID NO: 255 - RNA, 41 nt, Artificial Sequence
  source: /note="Description of Artificial Sequence: Synthetic oligonucleotide"
uaauuucuacuaaguguagauagcauuaaaugucaaguucu

SEQ ID NO: 256 - RNA, 41 nt, Artificial Sequence
  source: /note="Description of Artificial Sequence: Synthetic oligonucleotide"
uaauuucuacuaaguguagauagcauuaagugucaaguucu

SEQ ID NO: 257 - RNA, 41 nt, Artificial Sequence
  source: /note="Description of Artificial Sequence: Synthetic oligonucleotide"
uaauuucuacuaaguguagauauuugagcauuaaaugucaa

SEQ ID NO: 258 - RNA, 41 nt, Artificial Sequence
  source: /note="Description of Artificial Sequence: Synthetic oligonucleotide"
uaauuucuacuaaguguagauauuugagcauuaagugucaa

SEQ ID NO: 259 - DNA, 20 bp, Artificial Sequence
  source: /note="Description of Artificial Sequence: Synthetic primer"
atgagtcttctaaccgaggt

SEQ ID NO: 260 - DNA, 21 bp, Artificial Sequence
  source: /note="Description of Artificial Sequence: Synthetic primer"
ttcaagtctctgcgcgatctc

SEQ ID NO: 261 - DNA, 21 bp, Artificial Sequence
  source: /note="Description of Artificial Sequence: Synthetic primer"
ttgaggctctcatggaatggc

SEQ ID NO: 262 - DNA, 20 bp, Artificial Sequence
  source: /note="Description of Artificial Sequence: Synthetic primer"
agcgtgaacacaaatcctaa

SEQ ID NO: 263 - DNA, 20 bp, Artificial Sequence
  source: /note="Description of Artificial Sequence: Synthetic primer"
gaagatgtctttgcagggaa

SEQ ID NO: 264 - DNA, 22 bp, Artificial Sequence
  source: /note="Description of Artificial Sequence: Synthetic primer"
tcagaggtgacaggattggtct

SEQ ID NO: 265 - DNA, 20 bp, Artificial Sequence
  source: /note="Description of Artificial Sequence: Synthetic primer"
ttgtgttcacgctcaccgtg

SEQ ID NO: 266 - DNA, 20 bp, Artificial Sequence
  source: /note="Description of Artificial Sequence: Synthetic primer"
gacttgaagatgtctttgca

SEQ ID NO: 267 - DNA, 17 bp, Artificial Sequence
  source: /note="Description of Artificial Sequence: Synthetic primer"
cagatcttgaggctctc

SEQ ID NO: 268 - DNA, 21 bp, Artificial Sequence
  source: /note="Description of Artificial Sequence: Synthetic primer"
gtcttgtcttgtctttagcca

SEQ ID NO: 269 - DNA, 22 bp, Artificial Sequence
  source: /note="Description of Artificial Sequence: Synthetic primer"
ttagtcagaggtgacaggattg

SEQ ID NO: 270 - DNA, 19 bp, Artificial Sequence
  source: /note="Description of Artificial Sequence: Synthetic primer"
tttggacaaagcgtctacg

SEQ ID NO: 271 - RNA, 24 nt, Artificial Sequence
  source: /note="Description of Artificial Sequence: Synthetic oligonucleotide"
uuuguguucacgcucaccgugccc

SEQ ID NO: 272 - RNA, 24 nt, Artificial Sequence
  source: /note="Description of Artificial Sequence: Synthetic oligonucleotide"
uuuagccauuccaugagagccuca

SEQ ID NO: 273 - RNA, 24 nt, Artificial Sequence
  source: /note="Description of Artificial Sequence: Synthetic oligonucleotide"
uuuggacaaagcgucuacgcugca

SEQ ID NO: 274 - protein, 707 aa, Artificial Sequence
  source: /note="Description of Artificial Sequence: Synthetic polypeptide"
MADTPTLFTQFLRHHLPGQRFRKDILKQAGRILANKGEDATIAFLRGKSEESPPDFQPPVKCPIIACSRPLTEWPIYQASVAIQGYVYGQSLAEFEASDPGCSKDGLLGWFDKTGVCTDYFSVQGLNLIFQNARKRYIGVQTKVTNRNEKRHKKLKRINAKRIAEGLPELTSDEPESALDETGHLIDPPGLNTNIYCYQQVSPKPLALSEVNQLPTAYAGYSTSGDDPIQPMVTKDRLSISKGQPGYIPEHQRALLSQKKHRRMRGYGLKARALLVIVRIQDDWAVIDLRSLLRNAYWRRIVQTKEPSTITKLLKLVTGDPVLDATRMVATFTYKPGIVQVRSAKCLKNKQGSKLFSERYLNETVSVTSIDLGSNNLVAVATYRLVNGNTPELLQRFTLPSHLVKDFERYKQAHDTLEDSIQKTAVASLPQGQQTEIRMWSMYGFREAQERVCQELGLADGSIPWNVMTATSTILTDLFLARGGDPKKCMFTSEPKKKKNSKQVLYKIRDRAWAKMYRTLLSKETREAWNKALWGLKRGSPDYARLSKRKEELARRCVNYTISTAEKRAQCGRTIVALEDLNIGFFHGRGKQEPGWVGLFTRKKENRWLMQALHKAFLELAHHRGYHVIEVNPAYTSQTCPVCRHCDPDNRDQHNREAFHCIGCGFRGNADLDVATHNIAMVAITGESLKRARGSVASKTPQPLAAE

SEQ ID NO: 275 - protein, 757 aa, Artificial Sequence
  source: /note="Description of Artificial Sequence: Synthetic polypeptide"
MPKPAVESEFSKVLKKHFPGERFRSSYMKRGGKILAAQGEEAVVAYLQGKSEEEPPNFQPPAKCHVVTKSRDFAEWPIMKASEAIQRYIYALSTTERAACKPGKSSESHAAWFAATGVSNHGYSHVQGLNLIFDHTLGRYDGVLKKVQLRNEKARARLESINASRADEGLPEIKAEEEEVATNETGHLLQPPGINPSFYVYQTISPQAYRPRDEIVLPPEYAGYVRDPNAPIPLGVVRNRCDIQKGCPGYIPEWQREAGTAISPKTGKAVTVPGLSPKKNKRMRRYWRSEKEKAQDALLVTVRIGTDWVVIDVRGLLRNARWRTIAPKDISLNALLDLFTGDPVIDVRRNIVTFTYTLDACGTYARKWTLKGKQTKATLDKLTATQTVALVAIDLGQTNPISAGISRVTQENGALQCEPLDRFTLPDDLLKDISAYRIAWDRNEEELRARSVEALPEAQQAEVRALDGVSKETARTQLCADFGLDPKRLPWDKMSSNTTFISEALLSNSVSRDQVFFTPAPKKGAKKKAPVEVMRKDRTWARAYKPRLSVEAQKLKNEALWALKRTSPEYLKLSRRKEELCRRSINYVIEKTRRRTQCQIVIPVIEDLNVRFFHGSGKRLPGWDNFFTAKKENRWFIQGLHKAFSDLRTHRSFYVFEVRPERTSITCPKCGHCEVGNRDGEAFQCLSCGKTCNADLDVATHNLTQVALTGKTMPKREEPRDAQGTAPARKTKKASKSKAPPAEREDQTPAQEPSQTS

SEQ ID NO: 276 - protein, 765 aa, Artificial Sequence
  source: /note="Description of Artificial Sequence: Synthetic polypeptide"
MYILEMADLKSEPSLLAKLLRDRFPGKYWLPKYWKLAEKKRLTGGEEAACEYMADKQLDSPPPNFRPPARCVILAKSRPFEDWPVHRVASKAQSFVIGLSEQGFAALRAAPPSTADARRDWLRSHGASEDDLMALEAQLLETIMGNAISLHGGVLKKIDNANVKAAKRLSGRNEARLNKGLQELPPEQEGSAYGADGLLVNPPGLNLNIYCRKSCCPKPVKNTARFVGHYPGYLRDSDSILISGTMDRLTIIEGMPGHIPAWQREQGLVKPGGRRRRLSGSESNMRQKVDPSTGPRRSTRSGTVNRSNQRTGRNGDPLLVEIRMKEDWVLLDARGLLRNLRWRESKRGLSCDHEDLSLSGLLALFSGDPVIDPVRNEVVFLYGEGIIPVRSTKPVGTRQSKKLLERQASMGPLTLISCDLGQTNLIAGRASAISLTHGSLGVRSSVRIELDPEIIKSFERLRKDADRLETEILTAAKETLSDEQRGEVNSHEKDSPQTAKASLCRELGLHPPSLPWGQMGPSTTFIADMLISHGRDDDAFLSHGEFPTLEKRKKFDKRFCLESRPLLSSETRKALNESLWEVKRTSSEYARLSQRKKEMARRAVNFVVEISRRKTGLSNVIVNIEDLNVRIFHGGGKQAPGWDGFFRPKSENRWFIQAIHKAFSDLAAHHGIPVIESDPQRTSMTCPECGHCDSKNRNGVRFLCKGCGASMDADFDAACRNLERVALTGKPMPKPSTSCERLLSATTGKVCSDHSLSHDAIEKAS

SEQ ID NO: 277 - protein, 766 aa, Artificial Sequence
  source: /note="Description of Artificial Sequence: Synthetic polypeptide"
MEKEITELTKIRREFPNKKFSSTDMKKAGKLLKAEGPDAVRDFLNSCQEIIGDFKPPVKTNIVSISRPFEEWPVSMVGRAIQEYYFSLTKEELESVHPGTSSEDHKSFFNITGLSNYNYTSVQGLNLIFKNAKAIYDGTLVKANNKNKKLEKKFNEINHKRSLEGLPIITPDFEEPFDENGHLNNPPGINRNIYGYQGCAAKVFVPSKHKMVSLPKEYEGYNRDPNLSLAGFRNRLEIPEGEPGHVPWFQRMDIPEGQIGHVNKIQRFNFVHGKNSGKVKFSDKTGRVKRYHHSKYKDATKPYKFLEESKKVSALDSILAIITIGDDWVVFDIRGLYRNVFYRELAQKGLTAVQLLDLFTGDPVIDPKKGVVTFSYKEGVVPVFSQKIVPRFKSRDTLEKLTSQGPVALLSVDLGQNEPVAARVCSLKNINDKITLDNSCRISFLDDYKKQIKDYRDSLDELEIKIRLEAINSLETNQQVEIRDLDVFSADRAKANTVDMFDIDPNLISWDSMSDARVSTQISDLYLKNGGDESRVYFEINNKRIKRSDYNISQLVRPKLSDSTRKNLNDSIWKLKRTSEEYLKLSKRKLELSRAVVNYTIRQSKLLSGINDIVIILEDLDVKKKFNGRGIRDIGWDNFFSSRKENRWFIPAFHKAFSELSSNRGLCVIEVNPAWTSATCPDCGFCSKENRDGINFTCRKCGVSYHADIDVATLNIARVAVLGKPMSGPADRERLGDTKKPRVARSRKTMKRKDISNSTVEAMVTA

SEQ ID NO: 278 - protein, 812 aa, Artificial Sequence
  source: /note="Description of Artificial Sequence: Synthetic polypeptide"
MDMLDTETNYATETPAQQQDYSPKPPKKAQRAPKGFSKKARPEKKPPKPITLFTQKHFSGVRFLKRVIRDASKILKLSESRTITFLEQAIERDGSAPPDVTPPVHNTIMAVTRPFEEWPEVILSKALQKHCYALTKKIKIKTWPKKGPGKKCLAAWSARTKIPLIPGQVQATNGLFDRIGSIYDGVEKKVTNRNANKKLEYDEAIKEGRNPAVPEYETAYNIDGTLINKPGYNPNLYITQSRTPRLITEADRPLVEKILWQMVEKKTQSRNQARRARLEKAAHLQGLPVPKFVPEKVDRSQKIEIRIIDPLDKIEPYMPQDRMAIKASQDGHVPYWQRPFLSKRRNRRVRAGWGKQVSSIQAWLTGALLVIVRLGNEAFLADIRGALRNAQWRKLLKPDATYQSLFNLFTGDPVVNTRTNHLTMAYREGVVNIVKSRSFKGRQTREHLLTLLGQGKTVAGVSFDLGQKHAAGLLAAHFGLGEDGNPVFTPIQACFLPQRYLDSLTNYRNRYDALTLDMRRQSLLALTPAQQQEFADAQRDPGGQAKRACCLKLNLNPDEIRWDLVSGISTMISDLYIERGGDPRDVHQQVETKPKGKRKSEIRILKIRDGKWAYDFRPKIADETRKAQREQLWKLQKASSEFERLSRYKINIARAIANWALQWGRELSGCDIVIPVLEDLNVGSKFFDGKGKWLLGWDNRFTPKKENRWFIKVLHKAVAELAPHRGVPVYEVMPHRTSMTCPACHYCHPTNREGDRFECQSCHVVKNTDRDVAPYNILRVAVEGKTLDRWQAEKKPQAEPDRPMILIDNQES

SEQ ID NO: 279 - protein, 812 aa, Artificial Sequence
  source: /note="Description of Artificial Sequence: Synthetic polypeptide"
MDMLDTETNYATETPAQQQDYSPKPPKKAQRAPKGFSKKARPEKKPPKPITLFTQKHFSGVRFLKRVIRDASKILKLSESRTITFLEQAIERDGSAPPDVTPPVHNTIMAVTRPFEEWPEVILSKALQKHCYALTKKIKIKTWPKKGPGKKCLAAWSARTKIPLIPGQVQATNGLFDRIGSIYDGVEKKVTNRNANKKLEYDEAIKEGRNPAVPEYETAYNIDGTLINKPGYNPNLYITQSRTPRLITEADRPLVEKILWQMVEKKTQSRNQARRARLEKAAHLQGLPVPKFVPEKVDRSQKIEIRIIDPLDKIEPYMPQDRMAIKASQDGHVPYWQRPFLSKRRNRRVRAGWGKQVSSIQAWLTGALLVIVRLGNEAFLADIRGALRNAQWRKLLKPDATYQSLFNLFTGDPVVNTRTNHLTMAYREGVVDIVKSRSFKGRQTREHLLTLLGQGKTVAGVSFDLGQKHAAGLLAAHFGLGEDGNPVFTPIQACFLPQRYLDSLTNYRNRYDALTLDMRRQSLLALTPAQQQEFADAQRDPGGQAKRACCLKLNLNPDEIRWDLVSGISTMISDLYIERGGDPRDVHQQVETKPKGKRKSEIRILKIRDGKWAYDFRPKIADETRKAQREQLWKLQKASSEFERLSRYKINIARAIANWALQWGRELSGCDIVIPVLEDLNVGSKFFDGKGKWLLGWDNRFTPKKENRWFIKVLHKAVAELAPHKGVPVYEVMPHRTSMTCPACHYCHPTNREGDRFECQSCHVVKNTDRDVAPYNILRVAVEGKTLDRWQAEKKPQAEPDRPMILIDNQES

SEQ ID NO: 280 - protein, 793 aa, Artificial Sequence
  source: /note="Description of Artificial Sequence: Synthetic polypeptide"
MSSLPTPLELLKQKHADLFKGLQFSSKDNKMAGKVLKKDGEEAALAFLSERGVSRGELPNFRPPAKTLVVAQSRPFEEFPIYRVSEAIQLYVYSLSVKELETVPSGSSTKKEHQRFFQDSSVPDFGYTSVQGLNKIFGLARGIYLGVITRGENQLQKAKSKHEALNKKRRASGEAETEFDPTPYEYMTPERKLAKPPGVNHSIMCYVDISVDEFDFRNPDGIVLPSEYAGYCREINTAIEKGTVDRLGHLKGGPGYIPGHQRKESTTEGPKINFRKGRIRRSYTALYAKRDSRRVRQGKLALPSYRHHMMRLNSNAESAILAVIFFGKDWVVFDLRGLLRNVRWRNLFVDGSTPSTLLGMFGDPVIDPKRGVVAFCYKEQIVPVVSKSITKMVKAPELLNKLYLKSEDPLVLVAIDLGQTNPVGVGVYRVMNASLDYEVVTRFALESELLREIESYRQRTNAFEAQIRAETFDAMTSEEQEEITRVRAFSASKAKENVCHRFGMPVDAVDWATMGSNTIHIAKWVMRHGDPSLVEVLEYRKDNEIKLDKNGVPKKVKLTDKRIANLTSIRLRFSQETSKHYNDTMWELRRKHPVYQKLSKSKADFSRRVVNSIIRRVNHLVPRARIVFIIEDLKNLGKVFHGSGKRELGWDSYFEPKSENRWFIQVLHKAFSETGKHKGYYIIECWPNWTSCTCPKCSCCDSENRHGEVFRCLACGYTCNTDFGTAPDNLVKIATTGKGLPGPKKRCKGSSKGKNPKIARSSETGVSVTESGAPKVKKSSPTQTSQSSSQSAP

SEQ ID NO: 281 - protein, 441 aa, Artificial Sequence
  source: /note="Description of Artificial Sequence: Synthetic polypeptide"
MNKIEKEKTPLAKLMNENFAGLRFPFAIIKQAGKKLLKEGELKTIEYMTGKGSIEPLPNFKPPVKCLIVAKRRDLKYFPICKASCEIQSYVYSLNYKDFMDYFSTPMTSQKQHEEFFKKSGLNIEYQNVAGLNLIFNNVKNTYNGVILKVKNRNEKLKKKAIKNNYEFEEIKTFNDDGCLINKPGINNVIYCFQSISPKILKNITHLPKEYNDYDCSVDRNIIQKYVSRLDIPESQPGHVPEWQRKLPEFNNTNNPRRRRKWYSNGRNISKGYSVDQVNQAKIEDSLLAQIKIGEDWIILDIRGLLRDLNRRELISYKNKLTIKDVLGFFSDYPIIDIKKNLVTFCYKEGVIQVVSQKSIGNKKSKQLLEKLIENKPIALVSIDLGQTNPVSVKISKLNKINNKISIESFTYRFLNEEILKEIEKYRKDYDKLELKLINEA

SEQ ID NO: 282 - protein, 812 aa, Artificial Sequence
  source: /note="Description of Artificial Sequence: Synthetic polypeptide"
MDMLDTETNYATETPSQQQDYSPKPPKKDRRAPKGFSKKARPEKKPPKPITLFTQKHFSGVRFLKRVIRDASKILKLSESRTITFLEQAIERDGSAPPDVTPPVHNTIMAVTRPFEEWPEVILSKALQKHCYALTKKIKIKTWPKKGPGKKCLAAWSARTKIPLIPGQVQATNGLFDRIGSIYDGVEKKVTNRNANKKLEYDEAIKEGRNPAVPEYETAYNIDGTLINKPGYNPNLYITQSRTPRLITEADRPLVEKILWQMVEKKTQSRNQARRARLEKAAHLQGLPVPKFVPEKVDRSQKIEIRIIDPLDKIEPYMPQDRMAIKASQDGHVPYWQRPFLSKRRNRRVRAGWGKQVSSIQAWLTGALLVIVRLGNEAFLADIRGALRNAQWRKLLKPDATYQSLFNLFTGDPVVNTRTNHLTMAYREGVVDIVKSRSFKGRQTREHLLTLLGQGKTVAGVSFDLGQKHAAGLLAAHFGLGEDGNPVFTPIQACFLPQRYLDSLTNYRNRYDALTLDMRRQSLLALTPAQQQEFADAQRDPGGQAKRACCLKLNLNPDEIRWDLVSGISTMISDLYIERGGDPRDVHQQVETKPKGKRKSEIRILKIRDGKWAYDFRPKIADETRKAQREQLWKLQKASSEFERLSRYKINIARAIANWALQWGRELSGCDIVIPVLEDLNVGSKFFDGKGKWLLGWDNRFTPKKENRWFIKVLHKAVAELAPHRGVPVYEVMPHRTSMTCPACHYCHPTNREGDRFECQSCHVVKNTDRDVAPYNILRVAVEGKTLDRWQAEKKPQAEPDRPMILIDNQES

SEQ ID NO: 283 - protein, 812 aa, Artificial Sequence
  source: /note="Description of Artificial Sequence: Synthetic polypeptide"
MDMLDTETNYATETPSQQQDYSPKPPKKDRRAPKGFSKKARPEKKPPKPITLFTQKHFSGVRFLKRVIRDASKILKLSESRTITFLEQAIERDGSAPPDVTPPVHNTIMAVTRPFEEWPEVILSKALQKHCYALTKKIKIKTWPKKGPGKKCLAAWSARTKIPLIPGQVQATNGLFDRIGSIYDGVEKKVTNRNANKKLEYDEAIKEGRNPAVPEYETAYNIDGTLINKPGYNPNLYITQSRTPRLITEADRPLVEKILWQMVEKKTQSRNQARRARLEKAAHLQGLPVPKFVPEKVDRSQKIEIRIIDPLDKIEPYMPQDRMAIKASQDGHVPYWQRPFLSKRRNRRVRAGWGKQVSSIQAWLTGALLVIVRLGNEAFLADIRGALRNAQWRKLLKPDATYQSLFNLFTGDPVVNTRTNHLTMAYREGVVNIVKSRSFKGRQTREHLLTLLGQGKTVAGVSFDLGQKHAAGLLAAHFGLGEDGNPVFTPIQACFLPQRYLDSLTNYRNRYDALTLDMRRQSLLALTPAQQQEFADAQRDPGGQAKRACCLKLNLNPDEIRWDLVSGISTMISDLYIERGGDPRDVHQQVETKPKGKRKSEIRILKIRDGKWAYDFRPKIADETRKAQREQLWKLQKASSEFERLSRYKINIARAIANWALQWGRELSGCDIVIPVLEDLNVGSKFFDGKGKWLLGWDNRFTPKKENRWFIKVLHKAVAELAPHRGVPVYEVMPHRTSMTCPACHYCHPTNREGDRFECQSCHVVKNTDRDVAPYNILRVAVEGKTLDRWQAEKKPQAEPDRPMILIDNQES

SEQ ID NO: 284 - protein, 761 aa, Artificial Sequence
  source: /note="Description of Artificial Sequence: Synthetic polypeptide"
MSNKTTPPSPLSLLLRAHFPGLKFESQDYKIAGKKLRDGGPEAVISYLTGKGQAKLKDVKPPAKAFVIAQSRPFIEWDLVRVSRQIQEKIFGIPATKGRPKQDGLSETAFNEAVASLEVDGKSKLNEETRAAFYEVLGLDAPSLHAQAQNALIKSAISIREGVLKKVENRNEKNLSKTKRRKEAGEEATFVEEKAHDERGYLIHPPGVNQTIPGYQAVVIKSCPSDFIGLPSGCLAKESAEALTDYLPHDRMTIPKGQPGYVPEWQHPLLNRRKNRRRRDWYSASLNKPKATCSKRSGTPNRKNSRTDQIQSGRFKGAIPVLMRFQDEWVIIDIRGLLRNARYRKLLKEKSTIPDLLSLFTGDPSIDMRQGVCTFIYKAGQACSAKMVKTKNAPEILSELTKSGPVVLVSIDLGQTNPIAAKVSRVTQLSDGQLSHETLLRELLSNDSSDGKEIARYRVASDRLRDKLANLAVERLSPEHKSEILRAKNDTPALCKARVCAALGLNPEMIAWDKMTPYTEFLATAYLEKGGDRKVATLKPKNRPEMLRRDIKFKGTEGVRIEVSPEAAEAYREAQWDLQRTSPEYLRLSTWKQELTKRILNQLRHKAAKSSQCEVVVMAFEDLNIKMMHGNGKWADGGWDAFFIKKRENRWFMQAFHKSLTELGAHKGVPTIEVTPHRTSITCTKCGHCDKANRDGERFACQKCGFVAHADLEIATDNIERVALTGKPMPKPESERSGDAKKSVGARKAAFKPEEDAEAAE

SEQ ID NO: 285 - protein, 717 aa, Artificial Sequence
  source: /note="Description of Artificial Sequence: Synthetic polypeptide"
MIKPTVSQFLTPGFKLIRNHSRTAGLKLKNEGEEACKKFVRENEIPKDECPNFQGGPAIANIIAKSREFTEWEIYQSSLAIQEVIFTLPKDKLPEPILKEEWRAQWLSEHGLDTVPYKEAAGLNLIIKNAVNTYKGVQVKVDNKNKNNLAKINRKNEIAKLNGEQEISFEEIKAFDDKGYLLQKPSPNKSIYCYQSVSPKPFITSKYHNVNLPEEYIGYYRKSNEPIVSPYQFDRLRIPIGEPGYVPKWQYTFLSKKENKRRKLSKRIKNVSPILGIICIKKDWCVFDMRGLLRTNHWKKYHKPTDSINDLFDYFTGDPVIDTKANVVRFRYKMENGIVNYKPVREKKGKELLENICDQNGSCKLATVDVGQNNPVAIGLFELKKVNGELTKTLISRHPTPIDFCNKITAYRERYDKLESSIKLDAIKQLTSEQKIEVDNYNNNFTPQNTKQIVCSKLNINPNDLPWDKMISGTHFISEKAQVSNKSEIYFTSTDKGKTKDVMKSDYKWFQDYKPKLSKEVRDALSDIEWRLRRESLEFNKLSKSREQDARQLANWISSMCDVIGIENLVKKNNFFGGSGKREPGWDNFYKPKKENRWWINAIHKALTELSQNKGKRVILLPAMRTSITCPKCKYCDSKNRNGEKFNCLKCGIELNADIDVATENLATVAITAQSMPKPTCERSGDAKKPVRARKAKAPEFHDKLAPSYTVVLREAV

SEQ ID NO: 286 - protein, 781 aa, Artificial Sequence
  source: /note="Description of Artificial Sequence: Synthetic polypeptide"
MRQPAEKTAFQVFRQEVIGTQKLSGGDAKTAGRLYKQGKMEAAREWLLKGARDDVPPNFQPPAKCLVVAVSHPFEEWDISKTNHDVQAYIYAQPLQAEGHLNGLSEKWEDTSADQHKLWFEKTGVPDRGLPVQAINKIAKAAVNRAFGVVRKVENRNEKRRSRDNRIAEHNRENGLTEVVREAPEVATNADGFLLHPPGIDPSILSYASVSPVPYNSSKHSFVRLPEEYQAYNVEPDAPIPQFVVEDRFAIPPGQPGYVPEWQRLKCSTNKHRRMRQWSNQDYKPKAGRRAKPLEFQAHLTRERAKGALLVVMRIKEDWVVFDVRGLLRNVEWRKVLSEEAREKLTLKGLLDLFTGDPVIDTKRGIVTFLYKAEITKILSKRTVKTKNARDLLLRLTEPGEDGLRREVGLVAVDLGQTHPIAAAIYRIGRTSAGALESTVLHRQGLREDQKEKLKEYRKRHTALDSRLRKEAFETLSVEQQKEIVTVSGSGAQITKDKVCNYLGVDPSTLPWEKMGSYTHFISDDFLRRGGDPNIVHFDRQPKKGKVSKKSQRIKRSDSQWVGRMRPRLSQETAKARMEADWAAQNENEEYKRLARSKQELARWCVNTLLQNTRCITQCDEIVVVIEDLNVKSLHGKGAREPGWDNFFTPKTENRWFIQILHKTFSELPKHRGEHVIEGCPLRTSITCPACSYCDKNSRNGEKFVCVACGATFHADFEVATYNLVRLATTGMPMPKSLERQGGGEKAGGARKARKKAKQVEKIVVQANANVTMNGASLHSP

SEQ ID NO: 287 - protein, 793 aa, Artificial Sequence; identical to SEQ ID NO: 280
  source: /note="Description of Artificial Sequence: Synthetic polypeptide"

SEQ ID NO: 288 - protein, 717 aa, Artificial Sequence; identical to SEQ ID NO: 285
  source: /note="Description of Artificial Sequence: Synthetic polypeptide"

SEQ ID NO: 289 - protein, 761 aa, Artificial Sequence; identical to SEQ ID NO: 284
  source: /note="Description of Artificial Sequence: Synthetic polypeptide"

SEQ ID NO: 290 - protein, 765 aa, Artificial Sequence
  source: /note="Description of Artificial Sequence: Synthetic polypeptide"
MYSLEMADLKSEPSLLAKLLRDRFPGKYWLPKYWKLAEKKRLTGGEEAACEYMADKQLDSPPPNFRPPARCVILAKSRPFEDWPVHRVASKAQSFVIGLSEQGFAALRAAPPSTADARRDWLRSHGASEDDLMALEAQLLETIMGNAISLHGGVLKKIDNANVKAAKRLSGRNEARLNKGLQELPPEQEGSAYGADGLLVNPPGLNLNIYCRKSCCPKPVKNTARFVGHYPGYLRDSDSILISGTMDRLTIIEGMPGHIPAWQREQGLVKPGGRRRRLSGSESNMRQKVDPSTGPRRSTRSGTVNRSNQRTGRNGDPLLVEIRMKEDWVLLDARGLLRNLRWRESKRGLSCDHEDLSLSGLLALFSGDPVIDPVRNEVVFLYGEGIIPVRSTKPVGTRQSKKLLERQASMGPLTLISCDLGQTNLIAGRASAISLTHGSLGVRSSVRIELDPEIIKSFERLRKDADRLETEILTAAKETLSDEQRGEVNSHEKDSPQTAKASLCRELGLHPPSLPWGQMGPSTTFIADMLISHGRDDDAFLSHGEFPTLEKRKKFDKRFCLESRPLLSSETRKALNESLWEVKRTSSEYARLSQRKKEMARRAVNFVVEISRRKTGLSNVIVNIEDLNVRIFHGGGKQAPGWDGFFRPKSENRWFIQAIHKAFSDLAAHHGIPVIESDPQRTSMTCPECGHCDSKNRNGVRFLCKGCGASMDADFDAACRNLERVALTGKPMPKPSTSCERLLSATTGKVCSDHSLSHDAIEKAS

SEQ ID NO: 291 - protein, 766 aa, Artificial Sequence
  source: /note="Description of Artificial Sequence: Synthetic polypeptide"
MEKEITELTKIRREFPNKKFSSTDMKKAGKLLKAEGPDAVRDFLNSCQEIIGDFKPPVKTNIVSISRPFEEWPVSMVGRAIQEYYFSLTKEELESVHPGTSSEDHKSFFNITGLSNYNYTSVQGLNLIFKNAKAIYDGTLVKANNKNKKLEKKFNEINHKRSLEGLPIITPDFEEPFDENGHLNNPPGINRNIYGYQGCAAKVFVPSKHKMVSLPKEYEGYNRDPNLSLAGFRNRLEIPEGEPGHVPWFQRMDIPEGQIGHVNKIQRFNFVHGKNSGKVKFSDKTGRVKRYHHSKYKDATKPYKFLEESKKVSALDSILAIITIGDDWVVFDIRGLYRNVFYRELAQKGLTAVQLLDLFTGDPVIDPKKGVVTFSYKEGVVPVFSQKIVPRFKSRDTLEKLTSQGPVALLSVDLGQNEPVAARVCSLKNINDKITLDNSCRISFLDDYKKQIKDYRDSLDELEIKIRLEAINSLETNQQVEIRDLDVFSADRAKANTVDMFDIDPNLISWDSMSDARVSTQISDLYLKNGGDESRVYFEINNKRIKRSDYNISQLVRPKLSDSTRKNLNDSIWKLKRTSEEYLKLSKRKLELSRAVVNYTIRQSKLLSGINDIVIILEDLDVKKKFNGRGIRDIGWDNFFSSRKENRWFIPAFHKTFSELSSNRGLCVIEVNPAWTSATCPDCGFCSKENRDGINFTCRKCGVSYHADIDVATLNIARVAVLGKPMSGPADRERLGDTKKPRVARSRKTMKRKDISNSTVEAMVTA

SEQ ID NO: 292 - protein, 870 aa, Artificial Sequence
  source: /note="Description of Artificial Sequence: Synthetic polypeptide"
MLVRTSTLVQDNKNSRSASRAFLKKPKMPKNKHIKEPTELAKLIRELFPGQRFTRAINTQAGKILKHKGRDEVVEFLKNKGIDKEQFMDFRPPTKARIVATSGAIEEFSYLRVSMAIQECCFGKYKFPKEKVNGKLVLETVGLTKEELDDFLPKKYYENKKSRDRFFLKTGICDYGYTYAQGLNEIFRNTRAIYEGVFTKVNNRNEKRREKKDKYNEERRSKGLSEEPYDEDESATDESGHLINPPGVNLNIWTCEGFCKGPYVTKLSGTPGYEVILPKVFDGYNRDPNEIISCGITDRFAIPEGEPGHIPWHQRLEIPEGQPGYVPGHQRFADTGQNNSGKANPNKKGRMRKYYGHGTKYTQPGEYQEVFRKGHREGNKRRYWEEDFRSEAHDCILYVIHIGDDWVVCDLRGPLRDAYRRGLVPKEGITTQELCNLFSGDPVIDPKHGVVTFCYKNGLVRAQKTISAGKKSRELLGALTSQGPIALIGVDLGQTEPVGARAFIVNQARGSLSLPTLKGSFLLTAENSSSWNVFKGEIKAYREAIDDLAIRLKKEAVATLSVEQQTEIESYEAFSAEDAKQLACEKFGVDSSFILWEDMTPYHTGPATYYFAKQFLKKNGGNKSLIEYIPYQKKKSKKTPKAVLRSDYNIACCVRPKLLPETRKALNEAIRIVQKNSDEYQRLSKRKLEFCRRVVNYLVRKAKKLTGLERVIIAIEDLKSLEKFFTGSGKRDNGWSNFFRPKKENRWFIPAFHKAFSELAPNRGFYVIECNPARTSITDPDCGYCDGDNRDGIKFECKKCGAKHHTDLDVAPLNIAIVAVTGRPMPKTVSNKSKRERSGGEKSVGASRKRNHRKSKANQEMLDATSSAAE

SEQ ID NO: 293 - protein, 830 aa, Artificial Sequence
  source: /note="Description of Artificial Sequence: Synthetic polypeptide"
MPKIKKPTEISLLRKEVFPDLHFAKDRMRAASLVLKNEGREAAIEYLRVNHEDKPPNFMPPAKTPYVALSRPLEQWPIAQASIAIQKYIFGLTKDEFSATKKLLYGDKSTPNTESRKRWFEVTGVPNFGYMSAQGLNAIFSGALARYEGVVQKVENRNKKRFEKLSEKNQLLIEEGQPVKDYVPDTAYHTPETLQKLAENNHVRVEDLGDMIDRLVHPPGIHRSIYGYQQVPPFAYDPDNPKGIILPKAYAGYTRKPHDIIEAMPNRLNIPEGQAGYIPEHQRDKLKKGGRVKRLRTTRVRVDATETVRAKAEALNAEKARLRGKEAILAVFQIEEDWALIDMRGLLRNVYMRKLIAAGELTPTTLLGYFTETLTLDPRRTEATFCYHLRSEGALHAEYVRHGKNTRELLLDLTKDNEKIALVTIDLGQRNPLAAAIFRVGRDASGDLTENSLEPVSRMLLPQAYLDQIKAYRDAYDSFRQNIWDTALASLTPEQQRQILAYEAYTPDDSKENVLRLLLGGNVMPDDLPWEDMTKNTHYISDRYLADGGDPSKVWFVPGPRKRKKNAPPLKKPPKPRELVKRSDHNISHLSEFRPQLLKETRDAFEKAKIDTERGHVGYQKLSTRKDQLCKEILNWLEAEAVRLTRCKTMVLGLEDLNGPFFNQGKGKVRGWVSFFRQKQENRWIVNGFRKNALARAHDKGKYILELWPSWTSQTCPKCKHVHADNRHGDDFVCLQCGARLHADAEVATWNLAVVAIQGHSLPGPVREKSNDRKKSGSARKSKKANESGKVVGAWAAQATPKRATSKKETGTARNPVYNPLETQASCPAP

SEQ ID NO: 294 - protein, 790 aa, Artificial Sequence
  source: /note="Description of Artificial Sequence: Synthetic polypeptide"
MTPSPQIARLVETPLAAALKAHHPGKKFRSDYLKKAGKILKDQGVEAAMAHLDGKDQAEPPNFKPPAKCRIVARSREFSEWPIVKASVEIQKYIYGLTLEERKACDPGKSSASHKAWFAKTGVNTFGYSSVQGFNLIFGHTLGRYDGVLVKTENLNKKRAEKNERFRAKALAEGRAEPVCPPLVTATNDTGQDVTLEDGRVVRPGQLLQPPGINPNIYAYQQVSPKAYVPGIIELPEEFQGYSRDPNAVILPLVPRDRLSIPKGQPGYVPEPHREGLTGRKDRRMRRYYETERGTKLKRPPLTAKGRADKANEALLVVVRIDSDWVVMDVRGLLRNARWRRLVSKEGITLNGLLDLFTGDPVLNPKDCSVSRDTGDPVNDPRHGVVTFCYKLGVVDVCSKDRPIKGFRTKEVLERLTSSGTVGMVSIDLGQTNPVAAAVSRVTKGLQAETLETFTLPDDLLGKVRAYRAKTDRMEEGFRRNALRKLTAEQQAEITRYNDATEQQAKALVCSTYGIGPEEVPWERMTSNTTYISDHILDHGGDPDTVFFMATKRGQNKPTLHKRKDKAWGQKFRPAISVETRLARQAAEWELRRASLEFQKLSVWKTELCRQAVNYVMERTKKRTQCDVIIPVIEDLPVPLFHGSGKRDPGWANFFVHKRENRWFIDGLHKAFSELGKHRGIYVFEVCPQRTSITCPKCGHCDPDNRDGEKFVCLSCQATLNADLDVATTNLVRVALTGKVMPRSERSGDAQTPGPARKARTGKIKGSKPTSAPQGATQTDAKAHLSQTGV

SEQ ID NO: 295 - protein, 790 aa, Artificial Sequence
  source: /note="Description of Artificial Sequence: Synthetic polypeptide"
MTPSPQIARLVETPLAAALKAHHPGKKFRSDYLKKAGKILKDQGVEAAMAHLDGKDQAEPPNFKPPAKCRIVARSREFSEWPIVKASVEIQKYIYGLTLEERKACDPGKSSASHKAWFAKTGVNTFGYSSVQGFNLIFGHTLGRYDGVLVKTENLNKKRAEKNERFRAKALAEGRAEPVCPPLVTATNDTGQDVTLEDGRVVRPGQLLQPPGINPNIYAYQQVSPKAYVPGIIELPEEFQGYSRDPNAVILPLVPRDRLSIPKGQPGYVPEPHREGLTGRKDRRMRRYYETERGTKLKRPPLTAKGRADKANEALLVVVRIDSDWVVMDVRGLLRNARWRRLVSKEGITLNGLLDLFTGDPVLNPKDCSVSRDTGDPVNDPRHGVVTFCYKLGVVDVCSKDRPIKGFRTKEVLERLTSSGTVGMVSIDLGQTNPVAAAVSRVTKGLQAETLETFTLPDDLLGKVRAYRAKTDRMEEGFRRNALRKLTAEQQAEITRYNDATEQQAKALVCSTYGIGPEEVPWERMTSNTTYISDHILDHGGDPDTVFFMATKRGQNKPTLHKRKDKAWGQKFRPAISVETRLARQAAEWELRRASLEFQKLSVWKTELCRQAVNYVMERTKKRTQCDVIIPVIEDLPVPLFHGSGKRDPGWANFFVHKRENRWFIDGLHKAFSELGKHRGIYVFEVCPQRTSITCPKCGHCDPDNRDGEKFVCLSCQATLHADLDVATTNLVRVALTGKVMPRSERSGDAQTPGPARKARTGKIKGSKPTSAPQGATQTDAKAHLSQTGV

SEQ ID NO: 296 - protein, 782 aa, Artificial Sequence
  source: /note="Description of Artificial Sequence: Synthetic polypeptide"
MKTEKPKTALTLLREEVFPGKKYRLDVLKEAGKKLSTKGREATIEFLTGKDEERPQNFQPPAKTSIVAQSRPFDQWPIVQVSLAVQKYIYGLTQSEFEANKKALYGETGKAISTESRRAWFEATGVDNFGFTAAQGINPIFSQAVARYEGVIKKVENRNEKKLKKLTKKNLLRLESGEEIEDFEPEATFNEEGRLLQPPGANPNIYCYQQISPRIYDPSDPKGVILPQIYAGYDRKPEDIISAGVPNRLAIPEGQPGYIPEHQRAGLKTQGRIRCRASVEAKARAAILAVVHLGEDWVVLDLRGLLRNVYWRKLASPGTLTLKGLLDFFTGGPVLDARRGIATFSYTLKSAAAVHAENTYKGKGTREVLLKLTENNSVALVTVDLGQRNPLAAMIARVSRTSQGDLTYPESVEPLTRLFLPDPFLEEVRKYRSSYDALRLSIREAAIASLTPEQQAEIRYIEKFSAGDAKKNVAEVFGIDPTQLPWDAMTPRTTYISDLFLRMGGDRSRVFFEVPPKKAKKAPKKPPKKPAGPRIVKRTDGMIARLREIRPRLSAETNKAFQEARWEGERSNVAFQKLSVRRKQFARTVVNHLVQTAQKMSRCDTVVLGIEDLNVPFFHGRGKYQPGWEGFFRQKKENRWLINDMHKALSERGPHRGGYVLELTPFWTSLRCPKCGHTDSANRDGDDFVCVKCGAKLHSDLEVATANLALVAITGQSIPRPPREQSSGKKSTGTARMKKTSGETQGKGSKACVSEALNKIEQGTARDPVYNPLNSQVSCPAP

SEQ ID NO: 297 - protein, 774 aa, Artificial Sequence
  source: /note="Description of Artificial Sequence: Synthetic polypeptide"
VYNPDMKKPNNIRRIREEHFEGLCFGKDVLTKAGKIYEKDGEEAAIDFLMGKDEEDPPNFKPPAKTTIVAQSRPFDQWPIYQVSQAVQERVFAYTEEEFNASKEALFSGDISSKSRDFWFKTNNISDQGIGAQGLNTILSHAFSRYSGVIKKVENRNKKRLKKLSKKNQLKIEEGLEILEFKPDSAFNENGLLAQPPGINPNIYGYQAVTPFVFDPDNPGDVILPKQYEGYSRKPDDIIEKGPSRLDIPKGQPGYVPEHQRKNLKKKGRVRLYRRTPPKTKALASILAVLQIGKDWVLFDMRGLLRSVYMREAATPGQISAKDLLDTFTGCPVLNTRTGEFTFCYKLRSEGALHARKIYTKGETRTLLTSLTSENNTIALVTVDLGQRNPAAIMISRLSRKEELSEKDIQPVSRRLLPDRYLNELKRYRDAYDAFRQEVRDEAFTSLCPEHQEQVQQYEALTPEKAKNLVLKHFFGTHDPDLPWDDMTSNTHYIANLYLERGGDPSKVFFTRPLKKDSKSKKPRKPTKRTDASISRLPEIRPKMPEDARKAFEKAKWEIYTGHEKFPKLAKRVNQLCREIANWIEKEAKRLTLCDTVVVGIEDLSLPPKRGKGKFQETWQGFFRQKFENRWVIDTLKKAIQNRAHDKGKYVLGLAPYWTSQRCPACGFIHKSNRNGDHFKCLKCEALFHADSEVATWNLALVAVLGKGITNPDSKKPSGQKKTGTTRKKQIKGKNKGKETVNVPPTTQEVEDIIAFFEKDDETVRNPVYKPTGT

SEQ ID NO: 298 - protein, 769 aa, Artificial Sequence
  source: /note="Description of Artificial Sequence: Synthetic polypeptide"
MKKPNNIRRIREEHFEGLCFGKDVLTKAGKIYEKDGEEAAIDFLMGKDEEDPPNFKPPAKTTIVAQSRPFDQWPIYQVSQAVQERVFAYTEEEFNASKEALFSGDISSKSRDFWFKTNNISDQGIGAQGLNTILSHAFSRYSGVIKKVENRNKKRLKKLSKKNQLKIEEGLEILEFKPDSAFNENGLLAQPPGINPNIYGYQAVTPFVFDPDNPGDVILPKQYEGYSRKPDDIIEKGPSRLDIPKGQPGYVPEHQRKNLKKKGRVRLYRRTPPKTKALASILAVLQIGKDWVLFDMRGLLRSVYMREAATPGQISAKDLLDTFTGCPVLNTRTGEFTFCYKLRSEGALHARKIYTKGETRTLLTSLTSENNTIALVTVDLGQRNPAAIMISRLSRKEELSEKDIQPVSRRLLPDRYLNELKRYRDAYDAFRQEVRDEAFTSLCPEHQEQVQQYEALTPEKAKNLVLKHFFGTHDPDLPWDDMTSNTHYIANLYLERGGDPSKVFFTRPLKKDSKSKKPRKPTKRTDASISRLPEIRPKMPEDARKAFEKAKWEIYTGHEKFPKLAKRVNQLCREIANWIEKEAKRLTLCDTVVVGIEDLSLPPKRGKGKFQETWQGFFRQKFENRWVIDTLKKAIQNRAHDKGKYVLGLAPYWTSQRCPACGFIHKSNRNGDHFKCLKCEALFHADSEVATWNLALVAVLGKGITNPDSKKPSGQKKTGTTRKKQIKGKNKGKETVNVPPTTQEVEDIIAFFEKDDETVRNPVYKPTGT

SEQ ID NO: 299 - protein, 767 aa, Artificial Sequence
  source: /note="Description of Artificial Sequence: Synthetic polypeptide"
VIKTHFPAGRFRKDHQKTAGKKLKHEGEEACVEYLRNKVSDYPPNFKPPAKGTIVAQSRPFSEWPIVRASEAIQKYVYGLTVAELDVFSPGTSKPSHAEWFAKTGVENYGYRQVQGLNTIFQNTVNRFKGVLKKVENRNKKSLKRQEGANRRRVEEGLPEVPVTVESATDDEGRLLQPPGVNPSIYGYQGVAPRVCTDLQGFSGMSVDFAGYRRDPDAVLVESLPEGRLSIPKGERGYVPEWQRDPERNKFPLREGSRRQRKWYSNACHKPKPGRTSKYDPEALKKASAKDALLVSISIGEDWAIIDVRGLLRDARRRGFTPEEGLSLNSLLGLFTEYPVFDVQRGLITFTYKLGQVDVHSRKTVPTFRSRALLESLVAKEEIALVSVDLGQTNPASMKVSRVRAQEGALVAEPVHRMFLSDVLLGELSSYRKRMDAFEDAIRAQAFETMTPEQQAEITRVCDVSVEVARRRVCEKYSISPQDVPWGEMTGHSTFIVDAVLRKGGDESLVYFKNKEGETLKFRDLRISRMEGVRPRLTKDTRDALNKAVLDLKRAHPTFAKLAKQKLELARRCVNFIEREAKRYTQCERVVFVIEDLNVGFFHGKGKRDRGWDAFFTAKKENRWVIQALHKAFSDLGLHRGSYVIEVTPQRTSMTCPRCGHCDKGNRNGEKFVCLQCGATLHADLEVATDNIERVALTGKAMPKPPVRERSGDVQKAGTARKARKPLKPKQKTEPSVQEGSSDDGVDKSPGDASRNPVYNPSDTLSI

SEQ ID NO: 300 - protein, 763 aa, Artificial Sequence
  source: /note="Description of Artificial Sequence: Synthetic polypeptide"
MAKAKTLAALLRELLPGQHLAPHHRWVANKLLMTSGDAAAFVIGKSVSDPVRGSFRKDVITKAGRIFKKDGPDAAAAFLDGKWEDRPPNFQPPAKAAIVAISRSFDEWPIVKVSCAIQQYLYALPVQEFESSVPEARAQAHAAWFQDTGVDDCNFKSTQGLNAIFNHGKRTYEGVLKKAQNRNDKKNLRLERINAKRAEAGQAPLVAGPDESPTDDAGCLLHPPGINANIYCYQQVSPRPYEQSCGIQLPPEYAGYNRLSNVAIPPMPNRLDIPQGQPGYVPEHHRHGIKKFGRVRKRYGVVPGRNRDADGKRTRQVLTEAGAAAKARDSVLAVIRIGDDWTVVDLRGLLRNAQWRKLVPDGGITVQGLLDLFTGDPVIDPRRGVVTFIYKADSVGIHSEKVCRGKQSKNLLERLCAMPEKSSTRLDCARQAVALVSVDLGQRNPVAARFSRVSLAEGQLQAQLVSAQFLDDAMVAMIRSYREEYDRFESLVREQAKAALSPEQLSEIVRHEADSAESVKSCVCAKFGIDPAGLSWDKMTSGTWRIADHVQAAGGDVEWFFFKTCGKGKEIKTVRRSDFNVAKQFRLRLSPETRKDWNDAIWELKRGNPAYVSFSKRKSEFARRVVNDLVHRARRAVRCDEVVFAIEDLNISFFHGKGQRQMGWDAFFEVKQENRWFIQALHKAFVERATHKGGYVLEVAPARTSTTCPECRHCDPESRRGEQFCCIKCRHTCHADLEVATFNIEQVALTGVSLPKRLSSTLL

SEQ ID NO: 301 - protein, 761 aa, Artificial Sequence
  source: /note="Description of Artificial Sequence: Synthetic polypeptide"
MSKEKTPPSAYAILKAKHFPDLDFEKKHKMMAGRMFKNGASEQEVVQYLQGKGSESLMDVKPPAKSPILAQSRPFDEWEMVRTSRLIQETIFGIPKRGSIPKRDGLSETQFNELVASLEVGGKPMLNKQTRAIFYGLLGIKPPTFHAMAQNILIDLAINIRKGVLKKVDNLNEKNRKKVKRIRDAGEQDVMVPAEVTAHDDRGYLNHPPGVNPTIPGYQGVVIPFPEGFEGLPSGMTPVDWSHVLVDYLPHDRLSIPKGSPGYIPEWQRPLLNRHKGRRHRSWYANSLNKPRKSRTEEAKDRQNAGKRTALIEAERLKGVLPVLMRFKEDWLIIDARGLLRNARYRGVLPEGSTLGNLIDLFSDSPRVDTRRGICTFLYRKGRAYSTKPVKRKESKETLLKLTEKSTIALVSIDLGQTNPLTAKLSKVRQVDGCLVAEPVLRKLIDNASEDGKEIARYRVAHDLLRARILEDAIDLLGIYKDEVVRARSDTPDLCKERVCRFLGLDSQAIDWDRMTPYTDFIAQAFVAKGGDPKVVTIKPNGKPKMFRKDRSIKNMKGIRLDISKEASSAYREAQWAIQRESPDFQRLAVWQSQLTKRIVNQLVAWAKKCTQCDTVVLAFEDLNIGMMHGSGKWANGGWNALFLHKQENRWFMQAFHKALTELSAHKGIPTIEVLPHRTSITCTQCGHCHPGNRDGERFKCLKCEFLANTDLEIATDNIERVALTGLPMPKGERSSAKRKPGGTRKTKKSKHSGNSPLAAE

SEQ ID NO: 302 - protein, 746 aa, Artificial Sequence
  source: /note="Description of Artificial Sequence: Synthetic polypeptide"
MEKAGPTSPLSVLIHKNFEGCRFQIDHLKIAGRKLAREGEAAAIEYLLDKKCEGLPPNFQPPAKGNVIAQSRPFTEWAPYRASVAIQKYIYSLSVDERKVCDPGSSSDSHEKWFKQTGVQNYGYTHVQGLNLIFKHALARYDGVLKKVDNRNEKNRKKAERVNSFRREEGLPEEVFEEEKATDETGHLLQPPGVNHSIYCYQSVRPKPFNPRKPGGISLPEAYSGYSLKPQDELPIGSLDRLSIPPGQPGYVPEWQRSQLTTQKHRRKRSWYSAQKWKPRTGRTSTFDPDRLNCARAQGAILAVVRIHEDWVVFDVRGLLRNALWRELAGKGLTVRDLLDFFTGDPVVDTKRGVVTFTYKLGKVDVHSLRTVRGKRSKKVLEDLTLSSDVGLVTIDLGQTNVLAADYSKVTRSENGELLAVPLSKSFLPKHLLHEVTAYRTSYDQMEEGFRRKALLTLTEDQQVEVTLVRDFSVESSKTKLLQLGVDVTSLPWEKMSSNTTYISDQLLQQGADPASLFFDGERDGKPCRHKKKDRTWAYLVRPKVSPETRKALNEALWALKNTSPEFESLSKRKIQFSRRCMNYLLNEAKRISGCGQVVFVIEDLNVRVHHGRGKRAIGWDNFFKPKRENRWFMQALHKAASELAIHRGMHIIEACPARSSITCPKCGHCDPENRCSSDREKFLCVKCGAAFHADLEVATFNLRKVALTGTALPKSIDHSRDGLIPKGARNRKLKEPQANDEKACA

SEQ ID NO: 303 - protein, 735 aa, Artificial Sequence
  source: /note="Description of Artificial Sequence: Synthetic polypeptide"
MKEQSPLSSVLKSNFPGKKFLSADIRVAGRKLAQLGEAAAVEYLSPRQRDSVPNFRPPAFCTVVAKSRPFEEWPIYKASVLLQEQIYGMTGQEFEERCGSIPTSLSGLRQWASSVGLGAAMEGLHVQGMNLMVKNAINRYKGVLVKVENRNKKLVEANEAKNSSREERGLPPLRPPELGSAFGPDGRLVNPPGIDKSIRLYQGVSPVPVVKTTGRPTVHRLDIPAGEKGHVPLWQREAGLVKEGPRRRRMWYSNSNLKRSRKDRSAEASEARKADSVVVRVSVKEDWVDIDVRGLLRNVAWRGIERAGESTEDLLSLFSGDPVVDPSRDSVVFLYKEGVVDVLSKKVVGAGKSRKQLEKMVSEGPVALVSCDLGQTNYVAARVSVLDESLSPVRSFRVDPREFPSADGSQGVVGSLDRIRADSDRLEAKLLSEAEASLPEPVRAEIEFLRSERPSAVAGRLCLKLGIDPRSIPWEKMGSTTSFISEALSAKGSPLALHDGAPIKDSRFAHAARGRLSPESRKALNEALWERKSSSREYGVISRRKSEASRRMANAVLSESRRLTGLAVVAVNLEDLNMVSKFFHGRGKRAPGWAGFFTPKMENRWFIRSIHKAMCDLSKHRGITVIESRPERTSISCPECGHCDPENRSGERFSCKSCGVSLHADFEVATRNLERVALTGKPMPRRENLHSPEGATASRKTRKKPREATASTFLDLRSVLSSAENEGSGPAARAG

SEQ ID NO: 304 - protein, 725 aa, Artificial Sequence
  source: /note="Description of Artificial Sequence: Synthetic polypeptide"
MLPPSNKIGKSMSLKEFINKRNFKSSIIKQAGKILKKEGEEAVKKYLDDNYVEGYKKRDFPITAKCNIVASNRKIEDFDISKFSSFIQNYVFNLNKDNFEEFSKIKYNRKSFDELYKKIANEIGLEKPNYENIQGEIAVIRNAINIYNGVLKKVENRNKKIQEKNQSKDPPKLLSAFDDNGFLAERPGINETIYGYQSVRLRHLDVEKDKDIIVQLPDIYQKYNKKSTDKISVKKRLNKYNVDEYGKLISKRRKERINKDDAILCVSNFGDDWIIFDARGLLRQTYRYKLKKKGLCIKDLLNLFTGDPIINPTKTDLKEALSLSFKDGIINNRTLKVKNYKKCPELISELIRDKGKVAMISIDLGQTNPISYRLSKFTANNVAYIENGVISEDDIVKMKKWREKSDKLENLIKEEAIASLSDDEQREVRLYENDIADNTKKKILEKFNIREEDLDFSKMSNNTYFIRDCLKNKNIDESEFTFEKNGKKLDPTDACFAREYKNKLSELTRKKINEKIWEIKKNSKEYHKISIYKKETIRYIVNKLIKQSKEKSECDDIIVNIEKLQIGGNFFGGRGKRDPGWNNFFLPKEENRWFINACHKAFSELAPHKGIIVIESDPAYTSQTCPKCENCDKENRNGEKFKCKKCNYEANADIDVATENLEKIAKNGRRLIKNFDQLGERLPGAEMPGGARKRKPSKSLPKNGRGAGVGSEPELINQSPSQVIA

SEQ ID NO: 305 - protein, 718 aa, Artificial Sequence
  source: /note="Description of Artificial Sequence: Synthetic polypeptide"
VPDKKETPLVALCKKSFPGLRFKKHDSRQAGRILKSKGEGAAVAFLEGKGGTTQPNFKPPVKCNIVAMSRPLEEWPIYKASVVIQKYVYAQSYEEFKATDPGKSEAGLRAWLKATRVDTDGYFNVQGLNLIFQNARATYEGVLKKVENRNSKKVAKIEQRNEHRAERGLPLLTLDEPETALDETGHLRHRPGINCSVFGYQHMKLKPYVPGSIPGVTGYSRDPSTPIAACGVDRLEIPEGQPGYVPPWDRENLSVKKHRRKRASWARSRGGAIDDNMLLAVVRVADDWALLDLRGLLRNTQYRKLLDRSVPVTIESLLNLVTNDPTLSVVKKPGKPVRYTATLIYKQGVVPVVKAKVVKGSYVSKMLDDTTETFSLVGVDLGVNNLIAANALRIRPGKCVERLQAFTLPEQTVEDFFRFRKAYDKHQENLRLAAVRSLTAEQQAEVLALDTFGPEQAKMQVCGHLGLSVDEVPWDKVNSRSSILSDLAKERGVDDTLYMFPFFKGKGKKRKTEIRKRWDVNWAQHFRPQLTSETRKALNEAKWEAERNSSKYHQLSIRKKELSRHCVNYVIRTAEKRAQCGKVIVAVEDLHHSFRRGGKGSRKSGWGGFFAAKQEGRWLMDALFGAFCDLAVHRGYRVIKVDPYNTSRTCPECGHCDKANRDRVNREAFICVCCGYRGNADIDVAAYNIAMVAITGVSLRKAARASVASTPLESLAAE

SEQ ID NO: 306 - protein, 708 aa, Artificial Sequence
  source: /note="Description of Artificial Sequence: Synthetic polypeptide"
MSKTKELNDYQEALARRLPGVRHQKSVRRAARLVYDRQGEDAMVAFLDGKEVDEPYTLQPPAKCHILAVSRPIEEWPIARVTMAVQEHVYALPVHEVEKSRPETTEGSRSAWFKNSGVSNHGVTHAQTLNAILKNAYNVYNGVIKKVENRNAKKRDSLAAKNKSRERKGLPHFKADPPELATDEQGYLLQPPSPNSSVYLVQQHLRTPQIDLPSGYTGPVVDPRSPIPSLIPIDRLAIPPGQPGYVPLHDREKLTSNKHRRMKLPKSLRAQGALPVCFRVFDDWAVVDGRGLLRHAQYRRLAPKNVSIAELLELYTGDPVIDIKRNLMTFRFAEAVVEVTARKIVEKYHNKYLLKLTEPKGKPVREIGLVSIDLNVQRLIALAIYRVHQTGESQLALSPCLHREILPAKGLGDFDKYKSKFNQLTEEILTAAVQTLTSAQQEEYQRYVEESSHEAKADLCLKYSITPHELAWDKMTSSTQYISRWLRDHGWNASDFTQITKGRKKVERLWSDSRWAQELKPKLSNETRRKLEDAKHDLQRANPEWQRLAKRKQEYSRHLANTVLSMAREYTACETVVIAIENLPMKGGFVDGNGSRESGWDNFFTHKKENRWMIKDIHKALSDLAPNRGVHVLEVNPQYTSQTCPECGHRDKANRDPIQRERFCCTHCGAQRHADLEVATHNIAMVATTGKSLTGKSLAPQRLQEAAE

SEQ ID NO: 307 - protein, 491 aa, Artificial Sequence
  source: /note="Description of Artificial Sequence: Synthetic polypeptide"
VLLSDRIQYTDPSAPIPAMTVVDRRKIKKGEPGYVPPFMRKNLSTNKHRRMRLSRGQKEACALPVGLRLPDGKDGWDFIIFDGRALLRACRRLRLEVTSMDDVLDKFTGDPRIQLSPAGETIVTCMLKPQHTGVIQQKLITGKMKDRLVQLTAEAPIAMLTVDLGEHNLVACGAYTVGQRRGKLQSERLEAFLLPEKVLADFEGYRRDSDEHSETLRHEALKALSKRQQREVLDMLRTGADQARESLCYKYGLDLQALPWDKMSSNSTFIAQHLMSLGFGESATHVRYRPKRKASERTILKYDSRFAAEEKIKLTDETRRAWNEAIWECQRASQEFRCLSVRKLQLARAAVNWTLTQAKQRSRCPRVVVVVEDLNVRFMHGGGKRQEGWAGFFKARSEKRWFIQALHKAYTELPTNRGIHVMEVNPARTSITCTKCGYCDPENRYGEDFHCRNPKCKVRGGHVANADLDIATENLARVALSGPMPKAPKLK

SEQ ID NO: 308 - protein, 848 aa, Artificial Sequence
  source: /note="Description of Artificial Sequence: Synthetic polypeptide"
MTPSFGYQMIIVTPIHHASGAWATLRLLFLNPKTSGVMLGMTKTKSAFALMREEVFPGLLFKSADLKMAGRKFAKEGREAAIEYLRGKDEERPANFKPPAKGDIIAQSRPFDQWPIVQVSQAIQKYIFGLTKAEFDATKTLLYGEGNHPTTESRRRWFEATGVPDFGFTSAQGLNAIFSSALARYEGVIQKVENRNEKRLKKLSEKNQRLVEEGHAVEAYVPETAFHTLESLKALSEKSLVPLDDLMDKIDRLAQPPGINPCLYGYQQVAPYIYDPENPRGVVLPDLYLGYCRKPDDPITACPNRLDIPKGQPGYIPEHQRGQLKKHGRVRRFRYTNPQAKARAKAQTAILAVLRIDEDWVVMDLRGLLRNVYFREVAAPGELTARTLLDTFTGCPVLNLRSNVVTFCYDIESKGALHAEYVRKGWATRNKLLDLTKDGQSVALLSVDLGQRHPVAVMISRLKRDDKGDLSEKSIQVVSRTFADQYVDKLKRYRVQYDALRKEIYDAALVSLPPEQQAEIRAYEAFAPGDAKANVLSVMFQGEVSPDELPWDKMNTNTHYISDLYLRRGGDPSRVFFVPQPSTPKKNAKKPPAPRKPVKRTDENVSHMPEFRPHLSNETREAFQKAKWTMERGNVRYAQLSRFLNQIVREANNWLVSEAKKLTQCQTVVWAIEDLHVPFFHGKGKYHETWDGFFRQKKEDRWFVNVFHKAISERAPNKGEYVMEVAPYRTSQRCPVCGFVDADNRHGDHFKCLRCGVELHADLEVATWNIALVAVQGHGIAGPPREQSCGGETAGTARKGKNIKKNKGLADAVTVEAQDSEGGSKKDAGTARNPVYIPSESQVNCPAP

SEQ ID NO: 309 - protein, 781 aa, Artificial Sequence
  source: /note="Description of Artificial Sequence: Synthetic polypeptide"
MKPKTPKPPKTPVAALIDKHFPGKRFRASYLKSVGKKLKNQGEDVAVRFLTGKDEERPPNFQPPAKSNIVAQSRPIEEWPIHKVSVAVQEYVYGLTVAEKEACSDAGESSSSHAAWFAKTGVENFGYTSVQGLNKIFPPTFNRFDGVIKKVENRNEKKRQKATRINEAKRNKGQSEDPPEAEVKATDDAGYLLQPPGINHSVYGYQSITLCPYTAEKFPTIKLPEEYAGYHSNPDAPIPAGVPDRLAIPEGQPGHVPEEHRAGLSTKKHRRVRQWYAMANWKPKPKRTSKPDYDRLAKARAQGALLIVIRIDEDWVVVDARGLLRNVRWRSLGKREITPNELLDLFTGDPVLDLKRGVVTFTYAEGVVNVCSRSTTKGKQTKVLLDAMTAPRDGKKRQIGMVAVDLGQTNPIAAEYSRVGKNAAGTLEATPLSRSTLPDELLREIALYRKAHDRLEAQLREEAVLKLTAEQQAENARYVETSEEGAKLALANLGVDTSTLPWDAMTGWSTCISDHLINHGGDTSAVFFQTIRKGTKKLETIKRKDSSWADIVRPRLTKETREALNDFLWELKRSHEGYEKLSKRLEELARRAVNHVVQEVKWLTQCQDIVIVIEDLNVRNFHGGGKRGGGWSNFFTVKKENRWFMQALHKAFSDLAAHRGIPVLEVYPARTSITCLGCGHCDPENRDGEAFVCQQCGATFHADLEVATRNIARVALTGEAMPKAPAREQPGGAKKRGTSRRRKLTEVAVKSAEPTIHQAKNQQLNGTSRDPVYKGSELPAL

SEQ ID NO: 310 - protein, 767 aa, Artificial Sequence
  source: /note="Description of Artificial Sequence: Synthetic polypeptide"
MSEITDLLKANFKGKTFKSADMRMAGRILKKSGAQAVIKYLSDKGAVDPPDFRPPAKCNIIAQSRPFDEWPICKASMAIQQHIYGLTKNEFDESSPGTSSASHEQWFAKTGVDTHGFTHVQGLNLIFQHAKKRYEGVIKKVENYNEKERKKFEGINERRSKEGMPLLEPRLRTAFGDDGKFAEKPGVNPSIYLYQQTSPRPYDKTKHPYVHAPFELKEITTIPTQDDRLKIPFGAPGHVPEKHRSQLSMAKHKRRRAWYALSQNKPRPPKDGSKGRRSVRDLADLKAASLADAIPLVSRVGFDWVVIDGRGLLRNLRWRKLAHEGMTVEEMLGFFSGDPVIDPRRNVATFIYKAEHATVKSRKPIGGAKRAREELLKATASSDGVIRQVGLISVDLGQTNPVAYEISRMHQANGELVAEHLEYGLLNDEQVNSIQRYRAAWDSMNESFRQKAIESLSMEAQDEIMQASTGAAKRTREAVLTMFGPNATLPWSRMSSNTTCISDALIEVGKEEETNFVTSNGPRKRTDAQWAAYLRPRVNPETRALLNQAVWDLMKRSDEYERLSKRKLEMARQCVNFVVARAEKLTQCNNIGIVLENLVVRNFHGSGRRESGWEGFFEPKRENRWFMQVLHKAFSDLAQHRGVMVFEVHPAYSSQTCPACRYVDPKNRSSEDRERFKCLKCGRSFNADREVATFNIREIARTGVGLPKPDCERSRGVQTTGTARNPGRSLKSNKNPSEPKRVLQSKTRKKITSTETQNEPLATDLKT

SEQ ID NO: 311 - protein, 760 aa, Artificial Sequence
  source: /note="Description of Artificial Sequence: Synthetic polypeptide"
MTPKTESPLSALCKKHFPGKRFRTNYLKDAGKILKKHGEDAVVAFLSDKQEDEPANFCPPAKVHILAQSRPFEDWPINLASKAIQTYVYGLTADERKTCEPGTSKESHDRWFKETGVDHHGFTSVQGLNLIFKHTLNRYDGVIKKVETRNEKRRSSVVRINEKKAAEGLPLIAAEAEETAFGEDGRLLQPPGVNHSIYCFQQVSPQPYSSKKHPQVVLPHAVQGVDPDAPIPVGRPNRLDIPKGQPGYVPEWQRPHLSMKCKRVRMWYARANWRRKPGRRSVLNEARLKEASAKGALPIVLVIGDDWLVMDARGLLRSVFWRRVAKPGLSLSELLNVTPTGLFSGDPVIDPKRGLVTFTSKLGVVAVHSRKPTRGKKSKDLLLKMTKPTDDGMPRHVGMVAIDLGQTNPVAAEYSRVVQSDAGTLKQEPVSRGVLPDDLLKDVARYRRAYDLTEESIRQEAIALLSEGHRAEVTKLDQTTANETKRLLVDRGVSESLPWEKMSSNTTYISDCLVALGKTDDVFFVPKAKKGKKETGIAVKRKDHGWSKLLRPRTSPEARKALNENQWAVKRASPEYERLSRRKLELGRRCVNHIIQETKRWTQCEDIVVVLEDLNVGFFHGSGKRPDGWDNFFVSKRENRWFIQVLHKAFGDLATHRGTHVIEVHPARTSITCIKCGHCDAGNRDGESFVCLASACGDRRHADLEVATRNVARVAITGERMPPSEQARDVQKAGGARKRKPSARNVKSSYPAVEPAPASP

SEQ ID NO: 312 - protein, 752 aa, Artificial Sequence
  source: /note="Description of Artificial Sequence: Synthetic polypeptide"
MSDNKMKKLSKEEKPLTPLQILIRKYIDKSQYPSGFKTTIIKQAGVRIKSVKSEQDEINLANWIISKYDPTYIKRDFNPSAKCQIIATSRSVADFDIVKMSNKVQEIFFASSHLDKNVFDIGKSKSDHDSWFERNNVDRGIYTYSNVQGMNLIFSNTKNTYLGVAVKAQNKFSSKMKRIQDINNFRITNHQSPLPIPDEIKIYDDAGFLLNPPGVNPNIFGYQSCLLKPLENKEIISKTSFPEYSRLPADMIEVNYKISNRLKFSNDQKGFIQFKDKLNLFKINSQELFSKRRRLSGQPILLVASFGDDWVVLDGRGLLRQVYYRGIAKPGSITISELLGFFTGDPIVDPIRGVVSLGFKPGVLSQETLKTTSARIFAEKLPNLVLNNNVGLMSIDLGQTNPVSYRLSEITSNMSVEHICSDFLSQDQISSIEKAKTSLDNLEEEIAIKAVDHLSDEDKINFANFSKLNLPEDTRQSLFEKYPELIGSKLDFGSMGSGTSYIADELIKFENKDAFYPSGKKKFDLSFSRDLRKKLSDETRKSYNDALFLEKRTNDKYLKNAKRRKQIVRTVANSLVSKIEELGLTPVINIENLAMSGGFFDGRGKREKGWDNFFKVKKENRWVMKDFHKAFSELSPHHGVIVIESPPYCTSVTCTKCNFCDKKNRNGHKFTCQRCGLDANADLDIATENLEKVAISGKRMPGSERSSDERKVAVARKAKSPKGKAIKGVKCTITDEPALLSANSQDCSQSTS

SEQ ID NO: 313 - protein, 747 aa, Artificial Sequence
  source: /note="Description of Artificial Sequence: Synthetic polypeptide"
MALSLAEVRERHFKGLRFRSSYLKRAGKILKKEGEAACVAYLTGKDEESPPNFKPPAKCDVVAQSRPFEEWPIVQASVAVQSYVYGLTKEAFEAFNPGTTKQSHEACLAATGIDTCGYSNVQGLNLIFRQAKNRYEGVITKVENRNKKAKKKLTRKNEWRQKNGHSELPEAPEELTFNDEGRLLQPPGINPSLYTYQQISPTPWSPKDSSILPPQYAGYERDPNAPIPFGVAKDRLTIASGCPGYIPEWMRTAGEKTNPRTQKKFMHPGLSTRKNKRMRLPRSVRSAPLGALLVTIHLGEDWLVLDVRGLLRNARWRGVAPKDISTQGLLNLFTGDPVIDTRRGVVTFTYKPETVGIHSRTWLYKGKQTKEVLEKLTQDQTVALVAIDLGQTNPVSAAASRVSRSGENLSIETVDRFFLPDELIKELRLYRMAHDRLEERIREESTLALTEAQQAEVRALEHVVRDDAKNKVCAAFNLDAASLPWDQMTSNTTYLSEAILAQGVSRDQVFFTPNPKKGSKEPVEVMRKDRAWVYAFKAKLSEETRKAKNEALWALKRASPDYARLSKRREELCRRSVNMVINRAKKRTQCQVVIPVLEDLNIGFFHGSGKRLPGWDNFFVAKKENRWLMNGLHKSFSDLAVHRGFYVFEVMPHRTSITCPACGHCDSENRDGEAFVCLSCKRTYHADLDVATHNLTQVAGTGLPMPEREHPGGTKKPGGSRKPESPQTHAPILHRTDYSESADRLGS

SEQ ID NO: 314 - protein, 733 aa, Artificial Sequence
  source: /note="Description of Artificial Sequence: Synthetic polypeptide"
QAVIKYLSDKGAVDPPDFRPPAKCNIIAQSRPFDEWPICKASMAIQQHIYGLTKNEFDESSPGTSSASHEQWFAKTGVDTHGFTHVQGLNLIFQHAKKRYEGVIKKVENYNEKERKKFEGINERRSKEGMPLLEPRLRTAFGDDGKFAEKPGVNPSIYLYQQTSPRPYDKTKHPYVHAPFELKEITTIPTQDDRLKIPFGAPGHVPEKHRSQLSMAKHKRRRAWYALSQNKPRPPKDGSKGRRSVRDLADLKAASLADAIPLVSRVGFDWVVIDGRGLLRNLRWRKLAHEGMTVEEMLGFFSGDPVIDPRRNVATFIYKAEHATVKSRKPIGGAKRAREELLKATASSDGVIRQVGLISVDLGQTNPVAYEISRMHQANGELVAEHLEYGLLNDEQVNSIQRYRAAWDSMNESFRQKAIESLSMEAQDEIMQASTGAAKRTREAVLTMFGPNATLPWSRMSSNTTCISDALIEVGKEEETNFVTSNGPRKRTDAQWAAYLRPRVNPETRALLNQAVWDLMKRSDEYERLSKRKLEMARQCVNFVVARAEKLTQCNNIGIVLENLVVRNFHGSGRRESGWEGFFEPKRENRWFMQVLHKAFSDLAQHRGVMVFEVHPAYSSQTCPACRYVDPKNRSSEDRERFKCLKCGRSFNADREVATFNIREIARTGVGLPKPDCERSRDVQTPGTARKSGRSLKSQDNLSEPKRVLQSKTRKKITSTETQNEPLATDLKT

SEQ ID NO: 315 - protein, 702 aa, Artificial Sequence
  source: /note="Description of Artificial Sequence: Synthetic polypeptide"
MIKEQSELSKLIEKYYPGKKFYSNDLKQAGKHLKKSEHLTAKESEELTVEFLKSCKEKLYDFRPPAKALIISTSRPFEEWPIYKASESIQKYIYSLTKEELEKYNISTDKTSQENFFKESLIDNYGFANVSGLNLIFQHTKAIYDGVLKKVNNRNNKILKKYKRKIEEGIEIDSPELEKAIDESGHFINPPGINKNIYCYQQVSPTIFNSFKETKIICPFNYKRNPNDIIQKGVIDRLAIPFGEPGYIPDHQRDKVNKHKKRIRKYYKNNENKNKDAILAKINIGEDWVLFDLRGLLRNAYWRKLIPKQGITPQQLLDMFSGDPVIDPIKNNITFIYKESIIPIHSESIIKTKKSKELLEKLTKDEQIALVSIDLGQTNPVAARFSRLSSDLKPEHVSSSFLPDELKNEICRYREKSDLLEIEIKNKAIKMLSQEQQDEIKLVNDISSEELKNSVCKKYNIDNSKIPWDKMNGFTTFIADEFINNGGDKSLVYFTAKDKKSKKEKLVKLSDKKIANSFKPKISKETREILNKITWDEKISSNEYKKLSKRKLEFARRATNYLINQAKKATRLNNVVLVVEDLNSKFFHGSGKREDGWDNFFIPKKENRWFIQALHKSLTDVSIHRGINVIEVRPERTSITCPKCGCCDKENRKGEDFKCIKCDSVYHADLEVATFNIEKVAITGESMPKPDCERLGGEESIG

SEQ ID NO: 316 - protein, 661 aa, Artificial Sequence
  source: /note="Description of Artificial Sequence: Synthetic polypeptide"
VAFLDGKEVDEPYTLQPPAKCHILAVSRPIEEWPIARVTMAVQEHVYALPVHEVEKSRPETTEGSRSAWFKNSGVSNHGVTHAQTLNAILKNAYNVYNGVIKKVENRNAKKRDSLAAKNKSRERKGLPHFKADPPELATDEQGYLLQPPSPNSSVYLVQQHLRTPQIDLPSGYTGPVVDPRSPIPSLIPIDRLAIPPGQPGYVPLHDREKLTSNKHRRMKLPKSLRAQGALPVCFRVFDDWAVVDGRGLLRHAQYRRLAPKNVSIAELLELYTGDPVIDIKRNLMTFRFAEAVVEVTARKIVEKYHNKYLLKLTEPKGKPVREIGLVSIDLNVQRLIALAIYRVHQTGESQLALSPCLHREILPAKGLGDFDKYKSKFNQLTEEILTAAVQTLTSAQQEEYQRYVEESSHEAKADLCLKYSITPHELAWDKMTSSTQYISRWLRDHGWNASDFTQITKGRKKVERLWSDSRWAQELKPKLSNETRRKLEDAKHDLQRANPEWQRLAKRKQEYSRHLANTVLSMAREYTACETVVIAIENLPMKGGFVDGNGSRESGWDNFFTHKKENRWMIKDIHKALSDLAPNRGVHVLEVNPQYTSQTCPECGHRDKANRDPIQRERFCCTHCGAQRHADLEVATHNIAMVATTGKSLTGKSLAPQRLQ

SEQ ID NO: 317 - protein, 531 aa, Artificial Sequence
  source: /note="Description of Artificial Sequence: Synthetic polypeptide"
LEIPEGEPGHVPWFQRMDIPEGQIGHVNKIQRFNFVHGKNSGKVKFSDKTGRVKRYHHSKYKDATKPYKFLEESKKVSALDSILAIITIGDDWVVFDIRGLYRNVFYRELAQKGLTAVQLLDLFTGDPVIDPKKGIITFSYKEGVVPVFSQKIVSRFKSRDTLEKLTSQGPVALLSVDLGQNEPVAARVCSLKNINDKIALDNSCRIPFLDDYKKQIKDYRDSLDELEIKIRLEAINSLDVNQQVEIRDLDVFSADRAKASTVDMFDIDPNLISWDSMSDARFSTQISDLYLKNGGDESRVYFEINNKRIKRSDYNISQLVRPKLSDSTRKNLNDSIWKLKRTSEEYLKLSKRKLELSRAVVNYTIRQSKLLSGINDIVIILEDLDVKKKFNGRGIRDIGWDNFFSSRKENRWFIPAFHKSFSELSSNRGLCVIEVNPAWTSATCPDCGFCSKENRDGINFTCRKCGVSYHADIDVATLNIARVAVLGKPMSGPADRERLGGTKKPRVARSRKDMKRKDISNGTVEVMVTA

SEQ ID NO: 318 - protein, 479 aa, Artificial Sequence
  source: /note="Description of Artificial Sequence: Synthetic polypeptide"
IPSFGYLDRLKIAKGQPGYIPEWQRETINPSKKVRRYWATNHEKIRNAIPLVVFIGDDWVIIDGRGLLRDARRRKLADKNTTIEQLLEMVSNDPVIDSTRGIATLSYVEGVVPVRSFIPIGEKKGREYLEKSTQKESVTLLSVDIGQINPVSCGVYKVSNGCSKIDFLDKFFLDKKHLDAIQKYRTLQDSLEASIVNEALDEIDPSFKKEYQNINSQTSNDVKKSLCTEYNIDPEAISWQDITAHSTLISDYLIDNNITNDVYRTVNKAKYKTNDFGWYKKFSAKLSKEAREALNEKIWELKIASSKYKKLSVRKKEIARTIANDCVKRAETYGDNVVVAMESLTKNNKVMSGRGKRDPGWHNLGQAKVENRWFIQAISSAFEDKATHHGTPVLKVNPAYTSQTCPSCGHCSKDNRSSKDRTIFVCKSCGEKFNADLDVATYNIAHVAFSGKKLSPPSEKSSATKKPRSARKSKKSRKS

SEQ ID NO: 319 - protein, 452 aa, Artificial Sequence
  source: /note="Description of Artificial Sequence: Synthetic polypeptide"
SPIEKLLNGLLVKITFGNDWIICDARGLLDNVQKGIIHKSYFTNKSSLVDLIDLFTCNPIVNYKNNVVTFCYKEGVVDVKSFTPIKSGPKTQENLIKKLKYSRFQNEKDACVLGVGVDVGVTNPFAINGFKMPVDESSEWVMLNEPLFTIETSQAFREEIMAYQQRTDEMNDQFNQQSIDLLPPEYKVEFDNLPEDINEVAKYNLLHTLNIPNNFLWDKMSNTTQFISDYLIQIGRGTETEKTITTKKGKEKILTIRDVNWFNTFKPKISEETGKARTEIKRDLQKNSDQFQKLAKSREQSCRTWVNNVTEEAKIKSGCPLIIFVIEALVKDNRVFSGKGHRAIGWHNFGKQKNERRWWVQAIHKAFQEQGVNHGYPVILCPPQYTSQTCPKCNHVDRDNRSGEKFKCLKYGWIGNADLDVGAYNIARVAITGKALSKPLEQKKIKKAKNKT

SEQ ID NO: 320 - protein, 425 aa, Artificial Sequence
  source: /note="Description of Artificial Sequence: Synthetic polypeptide"
LLDNVQKGIIHKSYFTNKSSLVDLIDLFTCNPIVNYKNNVVTFCYKEGVVDVKSFTPIKSGPKTQENLIKKLKYSRFQNEKDACVLGVGVDVGVTNPFAINGFKMPVDESSEWVMLNEPLFTIETSQAFREEIMAYQQRTDEMNDQFNQQSIDLLPPEYKVEFDNLPEDINEVAKYNLLHTLNIPNNFLWDKMSNTTQFISDYLIQIGRGTETEKTITTKKGKEKILTIRDVNWFNTFKPKISEETGKARTEIKRDLQKNSDQFQKLAKSREQSCRTWVNNVTEEAKIKSGCPLIIFVIEALVKDNRVFSGKGHRAIGWHNFGKQKNERRWWVQAIHKAFQEQGVNHGYPVILCPPQYTSQTCPKCNHVDRDNRSGEKFKCLKYGWIGNADLDVGAYNIARVAITGKALSKPLEQKKIKKAKNKT

SEQ ID NO: 321 - protein, 735 aa, Artificial Sequence
  source: /note="Description of Artificial Sequence: Synthetic polypeptide"
MIKPTVSQFLTPGFKLIRNHSRTAGLKLKNEGEEACKKFVRENEIPKDECPNFQGGPAIANIIAKSREFTEWEIYQSSLAIQEVIFTLPKDKLPEPILKEEWRAQWLSEHGLDTVPYKEAAGLNLIIKNAVNTYKGVQVKVDNKNKNNLAKINRKNEIAKLNGEQEISFEEIKAFDDKGYLLQKPSPNKSIYCYQSVSPKPFITSKYHNVNLPEEYIGYYRKSNEPIVSPYQFDRLRIPIGEPGYVPKWQYTFLSKKENKRRKLSKRIKNVSPILGIICIKKDWCVFDMRGLLRTNHWKKYHKPTDSINDLFDYFTGDPVIDTKANVVRFRYKMENGIVNYKPVREKKGKELLENICDQNGSCKLATVDVGQNNPVAIGLFELKKVNGELTKTLISRHPTPIDFCNKITAYRERYDKLESSIKLDAIKQLTSEQKIEVDNYNNNFTPQNTKQIVCSKLNINPNDLPWDKMISGTHFISEKAQVSNKSEIYFTSTDKGKTKDVMKSDYKWFQDYKPKLSKEVRDALSDIEWRLRRESLEFNKLSKSREQDARQLANWISSMCDVIGIENLVKKNNFFGGSGKREPGWDNFYKPKKENRWWINAIHKALTELSQNKGKRVILLPAMRTSITCPKCKYCDSKNRNGEKFNCLKCGIELNADIDVATENLATVAITAQSMPKPTCERSGDAKKPVRARKAKAPEFHDKLAPSYTVVLREAVKRPAATKKAGQAKKKKEF

SEQ ID NO: 322 - protein, 18 aa, Artificial Sequence
  source: /note="Description of Artificial Sequence: Synthetic peptide"
KRPAATKKAGQAKKKKEF

SEQ ID NO: 323 - RNA, 41 nt, Artificial Sequence
  source: /note="Description of Artificial Sequence: Synthetic oligonucleotide"
uaauuucuacuaaguguagaucccccagcgcuucagcguuc

SEQ ID NO: 324 - RNA, 41 nt, Artificial Sequence
  source: /note="Description of Artificial Sequence: Synthetic oligonucleotide"
uaauuucuacuaaguguagauuugcuuucgugguauucuug

SEQ ID NO: 325 - RNA, 41 nt, Artificial Sequence
  source: /note="Description of Artificial Sequence: Synthetic oligonucleotide"
uaauuucuacuaaguguagaugugguauucuugcuaguuac

SEQ ID NO: 326 - RNA, 41 nt, Artificial Sequence
  source: /note="Description of Artificial Sequence: Synthetic oligonucleotide"
uaauuucuacuaaguguagaucuccaagugccucugcauuc

SEQ ID NO: 327 - RNA, 41 nt, Artificial Sequence
  source: /note="Description of Artificial Sequence: Synthetic oligonucleotide"
uaauuucuacuaaguguagaugcaauguuguuccuugagga

SEQ ID NO: 328 - RNA, 41 nt, Artificial Sequence
  source: /note="Description of Artificial Sequence: Synthetic oligonucleotide"
uaauuucuacuaaguguagaucacauaccgcagacgguaca

SEQ ID NO: 329 - RNA, 41 nt, Artificial Sequence
  source: /note="Description of Artificial Sequence: Synthetic oligonucleotide"
uaauuucuacuaaguguagaugaccugcgagcggguucuga

SEQ ID NO: 330 - RNA, 41 nt, Artificial Sequence
  source: /note="Description of Artificial Sequence: Synthetic oligonucleotide"
uaauuucuacuaaguguagauaauuacuugggugugacccu

SEQ ID NO: 331 - RNA, 41 nt, Artificial Sequence
  source: /note="Description of Artificial Sequence: Synthetic oligonucleotide"
uaauuucuacuaaguguagauuuacauggcucugguccgag

SEQ ID NO: 332 - DNA, 41 bp, Artificial Sequence
  source: /note="Description of Artificial Sequence: Synthetic oligonucleotide"
  source: /note="Description of Combined DNA/RNA Molecule: Synthetic oligonucleotide"
uaauuucuacuaaguguagauggcttccagggaacaggcct

SEQ ID NO: 333 - DNA, 931 bp, Severe acute respiratory syndrome coronavirus 2
ccaaattggctactaccgaagagctaccagacgaattcgtggtggtgacggtaaaatgaaagatctcagtccaagatggtatttctactacctaggaactgggccagaagctggacttccctatggtgctaacaaagacggcatcatatgggttgcaactgagggagccttgaatacaccaaaagatcacattggcacccgcaatcctgctaacaatgctgcaatcgtgctacaacttcctcaaggaacaacattgccaaaaggcttctacgcagaagggagcagaggcggcagtcaagcctcttctcgttcctcatcacgtagtcgcaacagttcaagaaattcaactccaggcagcagtaggggaacttctcctgctagaatggctggcaatggcggtgatgctgctcttgctttgctgctgcttgacagattgaaccagcttgagagcaaaatgtctggtaaaggccaacaacaacaaggccaaactgtcactaagaaatctgctgctgaggcttctaagaagcctcggcaaaaacgtactgccactaaagcatacaatgtaacacaagctttcggcagacgtggtccagaacaaacccaaggaaattttggggaccaggaactaatcagacaaggaactgattacaaacattggccgcaaattgcacaatttgcccccagcgcttcagcgttcttcggaatgtcgcgcattggcatggaagtcacaccttcgggaacgtggttgacctacacaggtgccatcaaattggatgacaaagatccaaatttcaaagatcaagtcattttgctgaataagcatattgacgcatacaaaacattcccaccaacagagcctaaaaaggacaaaaagaagaaggctgatgaaactcaagccttaccgcagagacagaagaaacagcaaactgtg

SEQ ID NO: 334 - DNA, 931 bp, Unknown
  source: /note="Description of Unknown: SARS-CoV N-gene sequence"
ccaaattggctactaccgaagagctacccgacgagttcgtggtggtgacggcaaaatgaaagagctcagccccagatggtacttctattacctaggaactggcccagaagcttcacttccctacggcgctaacaaagaaggcatcgtatgggttgcaactgagggagccttgaatacacccaaagaccacattggcacccgcaatcctaataacaatgctgccaccgtgctacaacttcctcaaggaacaacattgccaaaaggcttctacgcagagggaagcagaggcggcagtcaagcctcttctcgctcctcatcacgtagtcgcggtaattcaagaaattcaactcctggcagcagtaggggaaattctcctgctcgaatggctagcggaggtggtgaaactgccctcgcgctattgctgctagacagattgaaccagcttgagagcaaagtttctggtaaaggccaacaacaacaaggccaaactgtcactaagaaatctgctgctgaggcatctaaaaagcctcgccaaaaacgtactgccacaaaacagtacaacgtcactcaagcatttgggagacgtggtccagaacaaacccaaggaaatttcggggaccaagacctaatcagacaaggaactgattacaaacattggccgcaaattgcacaatttgctccaagtgcctctgcattctttggaatgtcacgcattggcatggaagtcacaccttcgggaacatggctgacttatcatggagccattaaattggatgacaaagatccacaattcaaagacaacgtcatactgctgaacaagcacattgacgcatacaaaacattcccaccaacagagcctaaaaaggacaaaaagaaaaagactgatgaagctcagcctttgccgcagagacaaaagaagcagcccactgtg

SEQ ID NO: 335 - DNA, 931 bp, Unknown
  source: /note="Description of Unknown: bat-SL-CoVZC45 N-gene sequence"
ccaaattggctactaccgtagagctaccagacgaattcgtggtggtgacggtaaaatgaaagagctcagccccagatggtatttttactatctaggaactggaccagaagctggacttccctatggtgctaacaaagaaggcatcatatgggttgcaactgagggagccttaaacacaccgaaagaccacattggcacccgcaatcctgctaacaatgctgcaatcgtgctacaacttcctcaaggaacaacattgccaaaaggcttctacgcagaagggagcagaggcggcagtcaagcttcttcacgctcctcatcacgtagtcgcaacagttcaagaaactcaactccaggcagcagtaggggaacttctcctgctagaatggctggcaatggcggtgacactgctcttgctttgctgctgctagataggttgaaccagcttgagaacaaagtatctggcaaaggccaacaacaacagggccaaactgtcactaagaaatctgctgctgaggcatctaaaaagcctcgccaaaaacgtactgctacaaaacagtacaacgtcactcaagcatttgggagacgtggtccagaacaaacccaaggaaattttggggaccaagaattaatcagacaaggaactgattacaaacattggccgcaaattgcacaatttgctccaagtgcctctgcattctttggaatgtcacgcattggcatggaagtcacaccttcgggaacatggctgacttatcatggagccattaaattggatgacaaagatccacaattcaaagataacgtcatactgctgaataagcacattgacgcatacaaaacattcccaccaacagagcctaaaaaggacaaaaagaaaaaggctgatgaacttcaggctttaccgcagagacagaagaaacaacaaactgtg

SEQ ID NO: 336 - DNA, 598 bp, Severe acute respiratory syndrome coronavirus 2
actattaccagctgtactcaactcaattgagtacagacactggtgttgaacatgttaccttcttcatctacaataaaattgttgatgagcctgaagaacatgtccaaattcacacaatcgacggttcatccggagttgttaatccagtaatggaaccaatttatgatgaaccgacgacgactactagcgtgcctttgtaagcacaagctgatgagtacgaacttatgtactcattcgtttcggaagagacaggtacgttaatagttaatagcgtacttctttttcttgctttcgtggtattcttgctagttacactagccatccttactgcgcttcgattgtgtgcgtactgctgcaatattgttaacgtgagtcttgtaaaaccttctttttacgtttactctcgtgttaaaaatctgaattcttctagagttcctgatcttctggtctaaacgaactaaatattatattagtttttctgtttggaactttaattttagccatggcagattccaacggtactattaccgttgaagagcttaaaaagctccttgaacaatggaacctagtaataggtttcctattccttacatggatt

SEQ ID NO: 337 - DNA, 595 bp, Unknown
  source: /note="Description of Unknown: SARS-CoV E-gene sequence"
tttactaccagcttgagtctacacaaattactacagacactggtattgaaaatgctacattcttcatctttaacaagcttgttaaagacccaccgaatgtgcaaatacacacaatcgacggctcttcaggagttgctaatccagcaatggatccaatttatgatgagccgacgacgactactagcgtgcctttgtaagcacaagaaagtgagtacgaacttatgtactcattcgtttcggaagaaacaggtacgttaatagttaatagcgtacttctttttcttgctttcgtggtattcttgctagtcacactagccatccttactgcgcttcgattgtgtgcgtactgctgcaatattgttaacgtgagtttagtaaaaccaacggtttacgtctactcgcgtgttaaaaatctgaactcttctgaaggagttcctgatcttctggtctaaacgaactaactattattattattctgtttggaactttaacattgcttatcatggcagacaacggtactattaccgttgaggagcttaaacaactcctggaacaatggaacctagtaataggtttcctattcctagcctggatt

SEQ ID NO: 338 - DNA, 598 bp, Unknown
  source: /note="Description of Unknown: bat-SL-CoVZC45 E-gene sequence"
attactaccagctgtactcaacacaagtgagtacagacactggtgttgaacatgttactttcttcatctacaataaaattgttgatgagcctgaagaacatgttcaaattcacacaatcgacggtacatctggagttgttaatccagcaatggaaccaatttatgatgaaccgacgacgactactagcgtgcctttgtaagcacaagctgatgagtacgaacttatgtactcattcgtttcggaagagacaggtacgttaatagttaatagcgtacttctttttcttgcttttgtggtattcttgctagtcacactagccatccttactgcgcttcgattgtgtgcgtactgctgcaatattgttaacgtgagtcttgtaaaaccttctttttacgtttactctcgtgttaaaaatctgaattcttctagagttcctgatcttttggtctaaacgaactaaatattatattagtctttctgtttggaactttaattttagccatgtcaggtgacaacggtaccattaccgttgaagagcttaaaaagctcttagaacaatggaacctagtaataggattcttgtttcttacatggatt

SEQ ID NO: 339 - DNA, 850 bp, Homo sapiens
actccgcagcccgttcaggaccccggcgcgggcagggcgcccacgagctggctggctgcttgcacccacatccttctttctctgggacctggggtcgcggttacttgggctggccggcgaacccttgagtggcctggcggggagcgggcctcgcgcgcctggagggccctgtggaacgaagagaggcacacagcatggcagaaaaccgagagccccgcggtgctgtggaggctgaactggatccagtggaatacacccttaggaaaaggcttcccagccgcctgccccggagacccaatgacatttatgtcaacatgaagacggactttaaggcccagctggcccgctgccagaagctgctggacggaggggcccggggtcagaacgcgtgctctgagatctacattcacggcttgggcctggccatcaaccgcgccatcaacatcgcgctgcagctgcaggcgggcagcttcgggtccttgcaggtggctgccaatacctccaccgtggagcttgttgatgagctggagccagagaccgacacacgggagccactgactcggatccgcaacaactcagccatccacatccgagtcttcagggtcacacccaagtaattgaaaagacactcctccacttatcccctccgtgatatggctcttcgcatgctgagtactggacctcggaccagagccatgtaagaaaaggcctgttccctggaagcccaaaggactctgcattgagggtgggggtaattgtctcttggtgggcccagttagtgggccttcctgagtgtgtgtatgcggtctgtaactattgccatataaataaaaaatcctgttgcactagt

SEQ ID NO: 340 - DNA, 52 bp, Artificial Sequence
  source: /note="Description of Artificial Sequence: Synthetic primer"
aattctaatacgactcactatagggccaaattggctactaccgaagagctac

SEQ ID NO: 341 - DNA, 30 bp, Artificial Sequence
  source: /note="Description of Artificial Sequence: Synthetic primer"
cacagtttgctgtttcttctgtctctgcgg

SEQ ID NO: 342 - DNA, 54 bp, Artificial Sequence
  source: /note="Description of Artificial Sequence: Synthetic primer"
aattctaatacgactcactatagggctggtgttgaacatgttaccttcttcatc

SEQ ID NO: 343 - DNA, 23 bp, Artificial Sequence
  source: /note="Description of Artificial Sequence: Synthetic primer"
cctattactaggttccattgttc

SEQ ID NO: 344 - DNA, 26 bp, Artificial Sequence
  source: /note="Description of Artificial Sequence: Synthetic primer"
acaggtacgttaatagttaatagcgt

SEQ ID NO: 345 - DNA, 22 bp, Artificial Sequence
  source: /note="Description of Artificial Sequence: Synthetic primer"
atattgcagcagtacgcacaca

SEQ ID NO: 346 - DNA, 20 bp, Artificial Sequence
  source: /note="Description of Artificial Sequence: Synthetic primer"
ttacaaacattggccgcaaa

SEQ ID NO: 347 - DNA, 18 bp, Artificial Sequence
  source: /note="Description of Artificial Sequence: Synthetic primer"
gcgcgacattccgaagaa

SEQ ID NO: 348 - DNA, 18 bp, Artificial Sequence
  source: /note="Description of Artificial Sequence: Synthetic primer"
aacacaagctttcggcag

SEQ ID NO: 349 - DNA, 22 bp, Artificial Sequence
  source: /note="Description of Artificial Sequence: Synthetic primer"
gaaatttggatctttgtcatcc

SEQ ID NO: 350 - DNA, 41 bp, Artificial Sequence
  source: /note="Description of Artificial Sequence: Synthetic primer"
tgcggccaatgtttgtaatcagccaaggaaattttggggac

SEQ ID NO: 351 - DNA, 39 bp, Artificial Sequence
  source: /note="Description of Artificial Sequence: Synthetic primer"
cgcattggcatggaagtcactttgatggcacctgtgtag

SEQ ID NO: 352 - DNA, 19 bp, Artificial Sequence
  source: /note="Description of Artificial Sequence: Synthetic primer"
ttccttgtctgattagttc

SEQ ID NO: 353 - DNA, 18 bp, Artificial Sequence
  source: /note="Description of Artificial Sequence: Synthetic primer"
accttcgggaacgtggtt

SEQ ID NO: 354 - DNA, 18 bp, Artificial Sequence
  source: /note="Description of Artificial Sequence: Synthetic primer"
ccgacgacgactactagc

SEQ ID NO: 355 - DNA, 23 bp, Artificial Sequence
  source: /note="Description of Artificial Sequence: Synthetic primer"
agagtaaacgtaaaaagaaggtt

SEQ ID NO: 356 - DNA, 41 bp, Artificial Sequence
  source: /note="Description of Artificial Sequence: Synthetic primer"
acctgtctcttccgaaacgaatttgtaagcacaagctgatg

SEQ ID NO: 357 - DNA, 41 bp, Artificial Sequence
  source: /note="Description of Artificial Sequence: Synthetic primer"
ctagccatccttactgcgctactcacgttaacaatattgca

SEQ ID NO: 358 - DNA, 19 bp, Artificial Sequence
  source: /note="Description of Artificial Sequence: Synthetic primer"
tcgattgtgtgcgtactgc

SEQ ID NO: 359 - DNA, 19 bp, Artificial Sequence
  source: /note="Description of Artificial Sequence: Synthetic primer"
tgagtacataagttcgtac

SEQ ID NO: 360 - DNA, 17 bp, Artificial Sequence
  source: /note="Description of Artificial Sequence: Synthetic primer"
ttgatgagctggagcca

SEQ ID NO: 361 - DNA, 18 bp, Artificial Sequence
  source: /note="Description of Artificial Sequence: Synthetic primer"
caccctcaatgcagagtc

SEQ ID NO: 362 - DNA, 41 bp, Artificial Sequence
  source: /note="Description of Artificial Sequence: Synthetic primer"
gtgtgaccctgaagactcggttttagccactgactcggatc

SEQ ID NO: 363 - DNA, 45 bp, Artificial Sequence
  source: /note="Description of Artificial Sequence: Synthetic primer"
cctccgtgatatggctcttcgtttttttcttacatggctctggtc

SEQ ID NO: 364 - DNA, 20 bp, Artificial Sequence
  source: /note="Description of Artificial Sequence: Synthetic primer"
atgtggatggctgagttgtt

SEQ ID NO: 365 - DNA, 20 bp, Artificial Sequence
  source: /note="Description of Artificial Sequence: Synthetic primer"
catgctgagtactggacctc

SEQ ID NO: 366 - DNA, 18 bp, Artificial Sequence
  source: /note="Description of Artificial Sequence: Synthetic primer"
cacatccgagtcttcagg

SEQ ID NO: 367 - DNA, 19 bp, Artificial Sequence
  source: /note="Description of Artificial Sequence: Synthetic primer"
ggcaatagttacagaccgc

SEQ ID NO: 368 - DNA, 44 bp, Artificial Sequence
  source: /note="Description of Artificial Sequence: Synthetic primer"
tccagtactcagcatgcgaagcacccaagtaattgaaaagacac

SEQ ID NO: 369 - DNA, 39 bp, Artificial Sequence
  source: /note="Description of Artificial Sequence: Synthetic primer"
ctggaagcccaaaggactctatacacacactcaggaagg

SEQ ID NO: 370 - DNA, 20 bp, Artificial Sequence
  source: /note="Description of Artificial Sequence: Synthetic primer"
cggaggggataagtggagga

SEQ ID NO: 371 - DNA, 17 bp, Artificial Sequence
  source: /note="Description of Artificial Sequence: Synthetic primer"
gcattgagggtgggggt

SEQ ID NO: 372 - DNA, 21 bp, Artificial Sequence
  source: /note="Description of Artificial Sequence: Synthetic oligonucleotide"
taattaattaattaattaatt

SEQ ID NO: 373 - DNA, 20 bp, Artificial Sequence
  source: /note="Description of Artificial Sequence: Synthetic oligonucleotide"
tttttttttttttttttttt

SEQ ID NO: 374 - RNA, 20 nt, Artificial Sequence
  source: /note="Description of Artificial Sequence: Synthetic oligonucleotide"
ggcuggccaaacugcugggu

SEQ ID NO: 375 - DNA, 990 bp, Unknown
  source: /note="Description of Unknown: Target nucleic acid sequence"
tggtccccgccaccccccacccccactttgcagataaaccacatgcaggaaggtcagcctggcaagtccagtaagttcaagcccaggtctcaactgggcagcagagctcctgctcttctttgtcctcatatacgagcacctctggacttaaaacttgaggaactggatggagaaaagttaatggtcagcagcgggttacatcttctttcatgcgcctttccattctttggatcagtagtcactaacgttcgccagccataagtcctcgacgtggagaggctcagagcctggcatgaacatgaccctgaattcggatgcagagcttcttcccatgatgatctgtccctcacagcagggtcttctctgtttcagggcatgaactacttggaggaccgtcgcttggtgcaccgcgacctggcagccaggaacgtactggtgaaaacaccgcagcatgtcaagatcacagattttgggctggccaaactgctgggtgcggaagagaaagaataccatgcagaaggaggcaaagtaaggaggtggctttaggtcagccagcattttcctgacaccagggaccaggctgccttcccactagctgtattgtttaacacatgcaggggaggatgctctccagacattctgggtgagctcgcagcagctgctgctggcagctgggtccagccagggtctcctggtagtgtgagccagagctgctttgggaacagtacttgctgggacagtgaatgaggatgttatccccaggtgatcattagcaaatgttaggtttcagtctctccctgcaggatatataagtccccttcaatagcgcaattgggaaaggtcacagctgccttggtggtccactgctgtcaaggacacctaaggaacaggaaaggccccatgcggacccgagctcccagggctgtctgtggctcgtggctgggacaggcagcaatggagtccttctctcccttcactggctcggtttct

SEQ ID NO: 376 - DNA, 240 bp, Unknown
  source: /note="Description of Unknown: Target nucleic acid sequence"
taactctgaaaacatttctagtcttgtaatcaacatcagggtaaaaatcatgtgttaatacaaaggtacaggaacaaagaatttgttcttcatggctctctgtgtctgatccaagaggcgaggccagtttcatttgagcattaagtgtcaagttctgcacgctatcatcatcaggggccgaggcttctctttgtttttaattaattgtttttaactgtgagtttatatacacttgaagca

SEQ ID NO: 377 - RNA, 41 nt, Artificial Sequence
  source: /note="Description of Artificial Sequence: Synthetic oligonucleotide"
uaauuucuacuaaguguagauagcugcucgaauuggcuuug

SEQ ID NO: 378 - DNA, 360 bp, Unknown
  source: /note="Description of Unknown: Target nucleic acid sequence"
agcagaagcagaggatttgtttagtcactggcaaacaggaaaaaaaaatggcggacaacaacatgaccacaacacaaattgaggtgggtccgggagcaaccaatgccaccataaactttgaagcaggaattctggagtgctatgaaaggctttcatggcaaagggcccttgactaccctggtcaagaccgcctaaacagactaaagagaaaattagagtcaagaataaagactcacaacaaaagtgagcctgaaagtaaaaggatgtctcttgaagagagaaaagcaattggagtaaaaatgatgaaagtactcctatttatgaatccgtctgctggaattgaagggtttgagccatact

SEQ ID NO: 379 - DNA, 2026 bp, Homo sapiens
ggagtattgaatagttgggaattggaacccctccagggggaaccaaacattgtcgttcagaagaagacaaagagagattgaaatgaagctgttgatttcaacacacaaattctggtggtagatgaaagcaaagcaagtaagtttctccgaatccctagtcaactggaggtagagacggactgcgcaggttaactacagctcccagcatgcctgaggggcgggctcagcggctgcgcagactggcgcgcgcggacggtcatgggacttcagcatggcggtgtttgcagatttggacctgcgagcgggttctgacctgaaggctctgcgcggacttgtggagacagccgctcaccttggctattcagttgttgctatcaatcatatcgttgactttaaggaaaagaaacaggaaattgaaaaaccagtagctgtttctgaactcttcacaactttgccaattgtacagggaaaatcaagaccaattaaaattttaactagattaacaattattgtctcggatccatctcactgcaatgttttgagagcaacttcttcaagggcccggctctatgatgttgttgcagtttttccaaagacagaaaagctttttcatattgcttgcacacatttagatgtggatttagtctgcataactgtaacagagaaactaccattttacttcaaaagacctcctattaatgtggcgattgaccgaggcctggcttttgaacttgtctatagccctgctatcaaagactccacaatgagaaggtatacaatttccagtgccctcaatttgatgcaaatctgcaaaggaaagaatgtaattatatctagtgctgcagaaaggcctttagaaataagagggccatatgacgtggcaaatctaggcttgctgtttgggctctctgaaagtgacgccaaggctgcggtgtccaccaactgccgagcagcgcttctccatggagaaactagaaaaactgcttttggaattatctctacagtgaagaaacctcggccatcagaaggagatgaagattgtcttccagcttccaagaaagccaagtgtgagggctgaaaagaatgccccagtctctgtcagcactcccttcttcccttttatagttcatcagccacaacaaaaataaaacctttgtgtgatttactgttttcatttggagctagaaatcaatagtctataaaaacagttttacttgcaatccattaaaacaacaaacgaaacctagtgaagcatctttttaaaaggctgccagcttaatgaatttagatgtactttaagagagaaagactggttatttctcctttgtgtaagtgataaacaacagcaaatatacttgaataaaatgtttcaggtatttttgtttcattttgtttttgagatagggtctttgttgctcaggctggagtacagtggcataatcacagctcactgcaacctcaatcctgggctcaagtgatcctcccgcttcagcctctcaagcagcgggaactacaggtgtgcactaccacacctggctattttttttttttttttttttttcccttgtagagacatggtctcactatgttgctgaggctggtctcaaactcctaggatcaagccatcctcccgctttggcctcctaaagtgctgggattacatgagccaccacatgcagccagatgtttgaatattttaagagcttctttcgaaagtttcttgttcatactcaaatagtagttattttgaagatattcaaacttatattgaagaagtgactttagttcctcttgttttaagcttctttcatgtattcaaatcagcatttttttctaagaaattgctatagaatttgtggaaggagagaggatacacatgtaaaattacatctggtctcttccttcactgcttcatgcctacgtaaggtctttgaaataggattccttacttttagttagaaacccctaaaacgctaatattgattttcctgatagctgtattaaaaatagcaaagcatcggactga

SEQ ID NO: 380 - DNA, 23 bp, Artificial Sequence
  source: /note="Description of Artificial Sequence: Synthetic primer"
tatatggtagaatcctgcttctc

SEQ ID NO: 381 - DNA, 6 bp, Artificial Sequence
  source: /note="Description of Artificial Sequence: Synthetic oligonucleotide"
  source: /note="Description of Combined DNA/RNA Molecule: Synthetic oligonucleotide"
tauugc

SEQ ID NO: 382 - DNA, 5 bp, Artificial Sequence
  source: /note="Description of Artificial Sequence: Synthetic oligonucleotide"
aaaaa

SEQ ID NO: 383 - DNA, 5 bp, Artificial Sequence
  source: /note="Description of Artificial Sequence: Synthetic oligonucleotide"
ccccc

SEQ ID NO: 384 - DNA, 5 bp, Artificial Sequence
  source: /note="Description of Artificial Sequence: Synthetic oligonucleotide"
ggggg

SEQ ID NO: 385 - DNA, 5 bp, Artificial Sequence
  source: /note="Description of Artificial Sequence: Synthetic oligonucleotide"
ttttt

SEQ ID NO: 386 - DNA, 6 bp, Artificial Sequence
  source: /note="Description of Artificial Sequence: Synthetic oligonucleotide"
ttatta

SEQ ID NO: 387 - DNA, 10 bp, Artificial Sequence
  source: /note="Description of Artificial Sequence: Synthetic oligonucleotide"
attattatta

SEQ ID NO: 388 - DNA, 7 bp, Artificial Sequence
  source: /note="Description of Artificial Sequence: Synthetic oligonucleotide"
ttttttt

SEQ ID NO: 389 - DNA, 11 bp, Artificial Sequence
  source: /note="Description of Artificial Sequence: Synthetic oligonucleotide"
ttttttttttt

SEQ ID NO: 390 - DNA, 35 bp, Artificial Sequence
  source: /note="Description of Artificial Sequence: Synthetic oligonucleotide"
ccggcagccataacgccgtgaatacgttctgccgg

SEQ ID NO: 391 - DNA, 9 bp, Artificial Sequence
  source: /note="Description of Artificial Sequence: Synthetic oligonucleotide"
ttttatttt

SEQ ID NO: 392 - DNA, 12 bp, Artificial Sequence
  source: /note="Description of Artificial Sequence: Synthetic oligonucleotide"
ttttattatttt

SEQ ID NO: 393 - DNA, 372 bp, Unknown
  source: /note="Description of Unknown: Target nucleic acid sequence"
agcgaaagcaggtagatattgaaagatgagtcttctaaccgaggtcgaaacgtacgttctctctatcgtcccgtcaggccccctcaaagccgagatcgcgcagagacttgaagatgtctttgcagggaaaaacacagatcttgaggctctcatggaatggctaaagacaagaccaatcctgtcacctctgactaaggggattttaggatttgtgttcacgctcaccgtgcccagtgagcgaggactgcagcgtagacgctttgtccaaaatgccctcaatgggaatggggacccaaacaacatggacagagcagttaaactgtacaggaagcttaaaagggaaataacgttccatggggccaaagaagtggc

SEQ ID NO: 394 - DNA, 34 bp, Unknown
  source: /note="Description of Unknown: Nucleic acid sequence comprising two PAM sites and a HERC2 SNP"
ccagtttcatttgagcattaagtgtcaagttctg

SEQ ID NO: 395 - DNA, 122 bp, Severe acute respiratory syndrome coronavirus 2
gaccaggaactaatcagacaaggaactgattacaaacattggccgcaaattgcacaatttgcccccagcgcttcagcgttcttcggaatgtcgcgcattggcatggaagtcacaccttcggg

SEQ ID NO: 396 - DNA, 122 bp, Unknown
  source: /note="Description of Unknown: bat-SL sequence"
gaccaagaattaatcagacaaggaactgattacaaacattggccgcaaattgcacaatttgctccaagtgcctctgcattctttggaatgtcacgcattggcatggaagtcacaccttcggg

SEQ ID NO: 397 - DNA, 122 bp, Unknown
  source: /note="Description of Unknown: bat-SL sequence"
gaccaagaattaatcagacaaggaactgattacaaacattggccgcaaattgcacaatttgctccaagtgcctctgcattctttggaatgtctcgcattggcatggaagtcacaccttcggg

SEQ ID NO: 398 - DNA, 122 bp, Unknown
  source: /note="Description of Unknown: SARS-CoV sequence"
gaccaagacctaatcagacaaggaactgattacaaacattggccgcaaattgcacaatttgctccaagtgcctctgcattctttggaatgtcacgcattggcatggaagtcacaccttcggg

SEQ ID NO: 399 - DNA, 133 bp, Severe acute respiratory syndrome coronavirus 2
gatcacattggcacccgcaatcctgctaacaatgctgcaatcgtgctacaacttcctcaaggaacaacattgccaaaaggcttctacgcagaagggagcagaggcggcagtcaagcctcttctcgttcctcat

SEQ ID NO: 400 - DNA, 133 bp, Unknown
  source: /note="Description of Unknown: bat-SL sequence"
gaccacattggcacccgcaatcctgctaacaatgctgcaatcgtgctacaacttcctcaaggaacaacattgccaaaaggcttctacgcagaagggagcagaggcggcagtcaagcttcttcacgctcctcat

SEQ ID NO: 401 - DNA, 133 bp, Unknown
  source: /note="Description of Unknown: SARS-CoV sequence"
gaccacattggcacccgcaatcctaataacaatgctgccaccgtgctacaacttcctcaaggaacaacattgccaaaaggcttctacgcagagggaagcagaggcggcagtcaagcctcttctcgctcctcat

SEQ ID NO: 402 - DNA, 119 bp, Severe acute respiratory syndrome coronavirus 2
agagacaggtacgttaatagttaatagcgtacttctttttcttgctttcgtggtattcttgctagttacactagccatccttactgcgcttcgattgtgtgcgtactgctgcaatattg

SEQ ID NO: 403 - DNA, 119 bp, Unknown
  source: /note="Description of Unknown: bat-SL sequence"
agagacaggtacgttaatagttaatagcgtacttctttttcttgcttttgtggtattcttgctagtcacactagccatccttactgcgcttcgattgtgtgcgtactgctgcaatattg

SEQ ID NO: 404 - DNA, 119 bp, Unknown
  source: /note="Description of Unknown: SARS-CoV sequence"
agaaacaggtacgttaatagttaatagcgtacttctttttcttgctttcgtggtattcttgctagtcacactagccatccttactgcgcttcgattgtgtgcgtactgctgcaatattg

SEQ ID NO: 405 - DNA, 34 bp, Severe acute respiratory syndrome coronavirus 2
cacaatttgcccccagcgcttcagcgttcttcgg

SEQ ID NO: 406 - DNA, 34 bp, Unknown
  source: /note="Description of Unknown: bat-SL-CoVZC45 sequence"
cacaatttgctccaagtgcctctgcattctttgg

SEQ ID NO: 407 - DNA, 34 bp, Unknown; identical to SEQ ID NO: 406
  source: /note="Description of Unknown: SARS-CoV sequence"

SEQ ID NO: 408 - DNA, 34 bp, Severe acute respiratory syndrome coronavirus 2
agccttttggcaatgttgttccttgaggaagttg

SEQ ID NO: 409 - DNA, 34 bp, Unknown; identical to SEQ ID NO: 408
  source: /note="Description of Unknown: bat-SL-CoVZC45 sequence"

SEQ ID NO: 410 - DNA, 34 bp, Unknown; identical to SEQ ID NO: 408
  source: /note="Description of Unknown: SARS-CoV sequence"

SEQ ID NO: 411 - DNA, 34 bp, Severe acute respiratory syndrome coronavirus 2
ttctttttcttgctttcgtggtattcttgctagt

SEQ ID NO: 412 - DNA, 34 bp, Unknown
  source: /note="Description of Unknown: bat-SL-CoVZC45 sequence"
ttctttttcttgcttttgtggtattcttgctagt

SEQ ID NO: 413 - DNA, 34 bp, Unknown; identical to SEQ ID NO: 411
  source: /note="Description of Unknown: SARS-CoV sequence"

SEQ ID NO: 414 - DNA, 34 bp, Severe acute respiratory syndrome coronavirus 2
cttgctttcgtggtattcttgctagttacactag

SEQ ID NO: 415 - DNA, 34 bp, Unknown
  source: /note="Description of Unknown: bat-SL-CoVZC45 sequence"
cttgcttttgtggtattcttgctagtcacactag

SEQ ID NO: 416 - DNA, 34 bp, Unknown
  source: /note="Description of Unknown: SARS-CoV sequence"
cttgctttcgtggtattcttgctagtcacactag

1. A microfluidic cartridge for detecting a target nucleic acid comprising:
a) an amplification chamber fluidically connected to a valve;
b) a detection chamber fluidically connected to the valve, wherein the valve is connected to a sample metering channel;
c) a detection reagent chamber fluidically connected to the detection chamber via a resistance channel, the detection reagent chamber comprising a programmable nuclease, a guide nucleic acid, and a labeled detector nucleic acid, wherein the labeled detector nucleic acid is capable of being cleaved upon binding of the guide nucleic acid to a segment of a target nucleic acid.

2. The microfluidic cartridge of claim 1, wherein the sample metering channel (i) controls volumes of liquids dispensed in a channel or chamber, and (ii) is fluidically connected to the detection chamber.

3. (canceled)

4. The microfluidic cartridge of claim 1, wherein the resistance channel (i) has a serpentine path, an angular path, or a circuitous path, and (ii) is fluidically connected with the valve.

5. The microfluidic cartridge of claim 1, wherein the valve:
(a) is a rotary valve, pneumatic valve, a hydraulic valve, an elastomeric valve;
(b) comprises casing, comprising a substrate or an oxer-mold;
(c) is actuated by a solenoid;
(d) is controlled manually, macmetically, electrically, thermally, by a bistable circuit, with a piezoelectric material, electrochemically, with phase change, theologically, pneumatically, with a check valve, with capillarity, or any combination thereof; or
(e) is fluidically connected to two or more detection chambers via an amplification mix sputter.

6.-9. (canceled)

10. The microfluidic cartridge of claim 1, wherein the valve is a rotary valve that fluidically connects at least 3, at least, 4, or at least 5 chambers.

11. The microfluidic cartridge of claim 1, further comprising one or more of:
(a) an amplification reagent chamber fluidically connected to the amplification chamber;
(b) a sample chamber fluidically connected to the amplification reagent chamber;
(c) a sample inlet connected to the sample chamber;
(d) a lysis buffer storage chamber connected to the sample chamber;
(e) a second valve fluidically connecting the lysis buffer storage chamber to the sample chamber; or
(f) a second valve fluidically connected to the detection reagent chamber and the detection chamber.

12.-20. (canceled)

21. The microfluidic cartridge of claim 11, wherein
(a) the sample chamber is fluidically connected to the amplification chamber through the amplification reagent chamber;
(b) the sample chamber is fluidically connected to the amplification reagent chamber through the amplification chamber; or
(c) the microfluidic cartridge is configured to direct fluid bidirectionally between the amplification reagent chamber and amplification chamber.

22.-23. (canceled)

24. The microfluidic cartridge of claim 1, wherein:
(a) the detection reagent chamber is fluidically connected to the amplification chamber;
(b) the amplification chamber is fluidically connected to the detection chamber through the detection reagent chamber;
(c) the microfluidic cartridge further comprises a reagent port above the detection chamber configured to deliver fluid from the detection reagent chamber to the detection chamber;
(d) the ampification chamber is fluidically connected to the detection reagent chamber through the detection chamber;
(e) the amplification chamber and detection chamber are thermally isolated;
(f) the detection reagent chamber is fluidically connected to the detection chamber; and/or
(g) the detection reagent chamber is fluidically connected to the detection chamber via a second resistance channel.

25.-27. (canceled)

28. The microfluidic cartridge claim 1, wherein the resistance channel is configured to reduce backflow into the detection chamber and the detection reagent chamber.

29. The microfluidic cartridge of claim 2, wherein the sample metering channel is configured to direct a predetermined volume of fluid from the detection reagent chamber to the detection chamber.

30.-37. (canceled)

38. The microfluidic cartridge of claim 1, wherein:
(a) the microfluidic cartridge is configured to connect to a first pump to pump fluid from the amplification chamber to the detection chamber;
(b) the microfluidic cartridge is configured to connect to a second pump to pump fluid from the detection reagent chamber to the detection chambers;
(c) the amplification chamber is fluidically connected to a port configured to receive pneumatic pressure; and/or
(d) the microfluidic cartridge comprises 5-7 layers.

39.-42. (canceled)

43. The microfluidic cartridge of claim 11, wherein:
(a) the amplification reagent chamber is connected to a second port configured to receive pneumatic pressure; or
(b) the microfluidic cartridge is configured to connect to a third pump to pump fluid from the amplification reagent chamber to the amplification chamber.

44.-46. (canceled)

47. The microfluidic cartridge of claim 1, wherein:
(a) the detection reagent chamber is connected to a port configured to receive pneumatic pressures;
(b) the detection reaaern chamber is fluidically connected to a third port through a third channel;
(c) the microfluidic cartridge is configured to connect to a fourth pump to pump fluid from the detection reagent chamber to the detection chamber; and/or
(d) the microfluidic cartridge further comprises a plurality of ports configured to couple to a gas manifold, wherein the plurality of ports is configured to receive pneumatic pressure.

48.-56. (canceled)

57. The microfluidic cartridge of claim 2, wherein:
(a) a region of the resistance channel is molded to direct flow in a direction perpendicular to the net flow direction;
(b) a region of the resistance channel is molded to direct flow in a direction perpendicular to the axis defined by two ends of the resistance channel; or
(c) a region of the resistance channel is molded to direct flow along the z-axis of the microfluidic cartridge.

58.-62. (canceled)

63. The microfluidic cartridge of claim 1, wherein the detection chamber: (a) is vented with a hydrophobic PTFE vent, and/or (b) comprises an optically transparent surface.

64. (canceled)

65. The microfluidic cartridge of claim 1, wherein:
(a) the amplification chamber is configured to hold from 10 μL to 500 μL of fluid;
(b) the microfluidic cartridge is configured to accept from 2 μL to 100 μL, of a sample comprising a nucleic acid;
(c) the amplification reagent chamber comprises between 5 and 200 μl an amplification buffer;
(d) the detection reagent chamber stores from 5 to 200 μl of fluid containing the programmable nuclease, the guide nucleic acid, and the labeled detector nucleic acid; and/or
(e) the detection chamber holds up to 100 μL, 200 μL, 300 μL, or 400 μL of fluid.

66.-70. (canceled)

71. The microfluidic cartridge of claim 1, comprising 2, 3, 4, 5, 6, 7, or 8 detection chambers, optionally wherein the detection chambers are fluidically connected to a single sample chamber.

72.-78. (canceled)

79. The microfluidic cartridge of claim 1, further comprising a sliding valve; optionally wherein the sliding valve:
(a) connects the amplification reagent chamber to the amplification chamber;
(b) connects the amplification chamber to the detection reagent chamber; and/or
(c) connects the amplification reagent chamber to the detection chamber.

80.-83. (canceled)

84. A manifold configured to accept the microfluidic cartridge of claim 1, the manifold comprising a pump configured to pump fluid into the detection chamber, an illumination source configured to illuminate the detection chamber, a detector configured to detect a detectable signal produced by the labeled detector nucleic acid, and a heater configured to heat the amplification chamber.

85. The manifold of claim 84, wherein:
(a) the manifold further comprises a second heater configured to heat the detection chamber;
(b) the illumination source is a broad spectrum light source;
(c) the illumination source light produces an illumination with a bandwidth of less than 5 nm;
(d) the illumination source is a light emitting diode;
(e) the detectable signal is light;
(f) the detector is a camera or a photodiode
(g) the detector has a detection bandwidth of less than 100 nm, less than 75 nm, less than 50 nm, less than 40 nm, less than 30 nm, less than 20 nm, less than 10 nm, or less than 5 nm;
(h) the manifold further comprises an optical filter configured to be between the detection chamber and the detector.

86.-93. (canceled)

94. The microfluidic cartridge of claim 1, wherein the amplification chamber comprises amplification reagents and/or lysis buffer.

95.-108. (canceled)

109. The microfluidic cartridge of claim 1, wherein the programmable nuclease:
(a) comprises an RuvC catalytic domain:
(b) is a type V CRISPR/Cas effector protein;
(c) is a Cas12 protein;
(d) comprises a Cas12a polypeptide, a Cas12b polypeptide, a Cas12c polypeptide, a Cas12d polypeptide, a Cas12e polypeptide, a C2c4 polypeptide, a C2c8 polypeptide, a C2c5 polypeptide, a C2c10 polypeptide, and a C2c9 polypeptide;
(e) has at least 80%, at least 85%, at least 90%, at least 92%, at least 95%, at least 97%, or at least 99% sequence identity to any one of SEQ ID NO: 27-SEQ ID NO: 37;
(f) is a Cas14 protein;
(g) comprises a Cas14a polypeptide, a Cas14b polypepetide, a Cas14c polypeptide, a Cas14d polypeptide, a Cas14e polypeptide, a Cas14f polypeptide, a Cas14g polypeptide, a Cas14h polypeptide, a Cas14i polypeptide, a Cas14j polypeptide, or a Cas14k polypeptide;
(h) has at least 80%, at least 85%, at least 90%, at least 92%, at least 95%, at least 97%, or at least 99% sequence identity to any one of SEQ ID NO: 38-SEQ ID NO: 129;
(i) is a CasΦ protein; or
(j) has at least 80%, at least 85%, at least 90%, at least 92%, at least 95%, at least 97%, or at least 99% sequence identity to any one of SEQ ID NO: 274-SEQ ID NO: 321.

110.-121. (canceled)

122. The microfluidic cartridge of claim 1, the microfluidic cartridge further comprising (i) one or more chambers for in vitro transcribing amplified coronavirus target nucleic acid, and (ii) reagents for in vitro transcription.

123.-124. (canceled)

125. The microfluidic cartridge of claim 1, wherein the programable nuclease comprises a HEPN cleaving domain, a type VI CRISPR/Cas effector protein, or a Cas13 protein.

126.-141. (canceled)

142. The microfluidic cartridge of claim 1, wherein the microfluidic cartridge comprises a control nucleic acid.

143. The microfluidic cartridge of claim 142, wherein:
(a) the control nucleic acid is in the detection chamber;
(b) the control nucleic acid is RNaseP;
(c) the control nucleic acid has a sequence of SEQ ID NO: 379; or
(d) the guide nucleic acid has at least 80%, at least 85%, at least 90%, at least 92%, at least 95%, at least 97%, or at least 99% sequence identify to any one of SEQ ID NO: 330-SEQ ID NO: 332.

144.-148. (canceled)

149. The microfluidic cartridge of claim 1, wherein:
(a) the guide nucleic acid targets a plurality of target sequences;
(b) the microfluidic cartridge comprises a plurality of guide sequences tiled against a virus;
(c) the labeled detector nucleic acid comprises a single stranded reporter comprising a detection moiety;
(d) the labeled detector moduces a detectable signal upon cleavage of the detector nucleic acid.

150.-156. (canceled)

157. A method of detecting a target nucleic acid, the method comprising:
a) providing a sample from a subject;
b) adding the sample to the microfluidic cartridge of claim 1;
c) detecting a detectable signal produced by a cleavage product of the labeled detector nucleic acid in response to the presence of the target nucleic acid; and
d) optionally quantifying the detectable signal, thereby quantifying an amount of the target nucleic acid present in the sample.

158.-164. (canceled)

165. A composition comprising a non-naturally occurring nucleic acid comprising a sequence according to any one of SEQ ID NOs: 348-353.

166. A composition comprising a non-naturally occurring nucleic acid comprising a sequence according to any one of SEQ ID NOs: 354-359.
